(19) United States
(12) Patent Application Publication
(10) Pub. No.: US 2010/0257635 A1
(43) Pub. Date: Oct. 7, 2010

(54) USE OF A SEED SPECIFIC PROMOTER TO DRIVE ODP1 EXPRESSION IN CRUCIFEROUS OILSEED PLANTS TO INCREASE OIL CONTENT WHILE MAINTAINING NORMAL GERMINATION

(75) Inventors: Knut Meyer, Wilmington, DE (US); Howard Glenn Damude, Hockessin, DE (US); John D. Everard, Wilmington, DE (US); Kevin G. Ripp, Wilmington, DE (US); Kevin L. Stecca, Bear, DE (US)

Correspondence Address: ALSTON & BIRD LLP;PIONEER HI-BRED INTERNATIONAL, INC., BANK OF AMERICA PLAZA, 101 SOUTH TRYON STREET, SUITE 4000, CHARLOTTE, NC, 28280-4000, US

(73) Assignee: E. I. DU PONT DE NEMOURS AND COMPANY, Wilmington, DE (US)

(21) Appl. No.: 12/752,175

(22) Filed: Apr. 1, 2010

Related U.S. Application Data
(60) Provisional application No. 61/165,548, filed on Apr. 1, 2009.

(51) Int. Cl. A01H 5/00; C12N 15/82

(52) U.S. Cl. 800/281; 800/298; 800/306; 435/320.1

(57) ABSTRACT

A recombinant DNA construct comprising a polynucleotide encoding an ODP1 polypeptide operably linked to a sucrose synthase 2 promoter where this construct can be used to increase oil content in the seeds of a cruciferous oilseed plant while maintaining normal germination is disclosed. A method for increasing oil content in the seeds of a cruciferous oilseed plant while maintaining normal germination using this construct is also disclosed.

### CROSS REFERENCE TO RELATED APPLICATIONS

[0001] This application claims the benefit of U.S. Provisional Application No. 61/165,548, filed Apr. 1, 2009, the entire content of which is herein incorporated by reference.

### FIELD OF THE INVENTION

[0002] This invention is in the field of biotechnology, in particular, this pertains to increasing oil content while maintaining normal germination in a cruciferous oilseed plant using a seed specific promoter to drive expression of ODP1.

### BACKGROUND OF THE INVENTION

[0003] Plant lipids have a variety of industrial and nutritional uses and are central to plant membrane function and climatic adaptation. These lipids represent a vast array of chemical structures, and these structures determine the physiological and industrial properties of the lipid. Many of these structures result either directly or indirectly from metabolic processes that alter the degree of unsaturation of the lipid. Different metabolic regimes in different plants produce these altered lipids, and either domestication of exotic plant species or modification of agronomically adapted species is usually required to produce economically large amounts of the desired lipid.

[0004] There are serious limitations to using mutagenesis to alter fatty acid composition and content. Screens will rarely uncover mutations that a) result in a dominant (“gain-of-function”) phenotype, b) are in genes that are essential for plant growth, and c) are in an enzyme that is not rate-limiting and that is encoded by more than one gene. In cases where desired phenotypes are available in mutant corn lines, their introgression into elite lines by traditional breeding techniques is slow and expensive, since the desired oil compositions are likely the result of several recessive genes.

[0005] Recent molecular and cellular biology techniques offer the potential for overcoming some of the limitations of the mutagenesis approach, including the need for extensive breeding. Some of the particularly useful technologies are seed-specific expression of foreign genes in transgenic plants (see Goldberg et al (1989) Cell 56:149-160), and the use of antisense RNA to inhibit plant target genes in a dominant and tissue-specific manner (see van der Krol et al (1988) Gene 72:45-50). Other advances include the transfer of foreign genes into elite commercial varieties of commercial oilcrops, such as soybean (Chee et al (1989) Plant Physiol. 91:1212-1218; Christou et al (1989) Proc. Natl. Acad. Sci. U.S.A. 86:7500-7504; Hinchee et al (1988) Bio/Technology 6:915-922; EPO publication 0 301 749 A2), rapeseed (De Block et al (1989) Plant Physiol. 91:694-701), and sunflower (Everett et al (1987) Bio/Technology 5:1201-1204), and the use of genes as restriction fragment length polymorphism (RFLP) markers in a breeding program, which makes introgression of recessive traits into elite lines rapid and less expensive (Tanksley et al (1989) Bio/Technology 7:257-264). However, application of each of these technologies requires identification and isolation of commercially-important genes.

[0006] Transcription factors generally bind DNA in a sequence-specific manner and either activate or repress transcription initiation. The specific mechanisms of these interactions remain to be fully elucidated. At least three types of separate domains have been identified within transcription factors. One is necessary for sequence-specific DNA recognition, one for the activation/repression of transcriptional initiation, and one for the formation of protein-protein interactions (such as dimerization). Studies indicate that many plant transcription factors can be grouped into distinct classes based on their conserved DNA binding domains (Katagiri F and Chua N H, 1992, Trends Genet. 8:22-27; Menkens A E, Schindler U and Cashmore A R, 1995, Trends in Biochem Sci. 13:506-510; Martin C and Paz-Ares J, 1997, Trends Genet. 13:67-73). Each member of these families interacts and binds with distinct DNA sequence motifs that are often found in multiple gene promoters controlled by different regulatory signals.

[0007] Several transcription factor families have been identified in plants. For example, nucleotide sequences encoding the following transcription factors families have been identified: Alfin-like, AP2 (APETALA2) and EREBPs (ethylene-responsive element binding proteins), ARF, AUX/IAA, bHLH, bZIP, C2C2 (Zn), C2C2 (Co-like), C2C2 (D of), C2C2 (GATA), C2C2 (YABBY), C2H2 (Zn), C3H-type, CCAAT, CCAAT HAP3, CCAAT HAP5, CPP (Zn), DRAP1, E2F/DP, GARP, GRAS, HMG-BOX, HOMED BOX, HSF, Jumanji, LFY, LIM, MADS Box, MYB, NAC, NIN-like, Polycomb-like, RAV-like, SBP, TCP, TFIID, Transfactor, Trihelix, TUBBY, and WRKY.

[0008] WO 2005/075655 published on Aug. 18, 2005 describes an AP2 domain transcription factor ODP2 (ovule development protein 2) and methods of U.S. Pat. No. 7,157,621 which issued on Jan. 2, 2007, describes the alteration of oil traits in plants through controlled expression of selected genes in plants.

[0009] The AP2/ERF family of proteins is a plant-specific class of putative transcription factors that have been shown to regulate a wide-variety of developmental processes and are characterized by the presence of an AP2/ERF DNA binding domain. The AP2/ERF proteins have been subdivided into two distinct subfamilies based on whether they contain one (ERF subfamily) or two (AP2 subfamily) DNA binding domains.

[0010] Specifically, AP2 (APETALA2) and EREBPs (ethylene-responsive element binding proteins) are the prototypic members of a family of transcription factors unique to plants, whose distinguishing characteristic is that they contain the so-called AP2 DNA-binding domain. AP2/EREBP genes form a large multigene family, and they play a variety of roles throughout the plant life cycle. AP2/EREBP genes are key regulators of several developmental processes, including floral organ identity determination and leaf epidermal cell identity. In Arabidopsis thaliana, the homeotic gene APETALA2 (AP2) has been shown to control three salient processes during development: (1) the specification of flower organ identity throughout floral organogenesis (Jofuku et al., Plant Cell 6:1211-1225, 1994); (2) establishment of flower meristem identity (Irish and Sussex, Plant Cell 2:8:741-753, 1990); and (3) the temporal and spatial regulation of flower homeotic gene activity (Drews et al., Cell 65:6:991-1002, 1991). DNA sequence analysis suggests that AP2 encodes a theoretical polypeptide of 432 aa, with a distinct 68 aa repeated motif termed the AP2 domain. This domain has been shown to be essential for AP2 functions and contains within the 68 aa, an eighteen amino acid core region that is predicted to form an amphipathic α-helix (Jofuku et al., Plant Cell 6:1211-1225, 1994). AP2-like domain-containing transcription factors have been also been identified in both Arabidopsis thaliana (Okamuro et al., Proc. Natl. Acad. Sci. USA 94:7076-7081, 1997) and in tobacco with the identification of the ethylene responsive element binding proteins (EREBPs) (Ohme-Takagi and Shinshi, Plant Cell 7:2:173-182, 1995). In Arabidopsis, these RAP2 (related to AP2) genes encode two distinct subfamilies of AP2 domain-containing proteins designated AP2-like and EREBP-like (Okamuro et al., Proc. Natl. Acad. Sci. USA 94:7076-7081, 1997). In vitro DNA binding has not been shown to date using the RAP2 proteins. Based upon the presence of two highly conserved motifs YRG and RAYD within the AP2 domain, it has been proposed that binding DNA binding occurs in a manner similar to that of AP2 proteins.

[0011] As was noted above, regulation of transcription of most eukaryotic genes is coordinated through sequence-specific binding of proteins to the promoter region located upstream of the gene. Many of these protein-binding sequences have been conserved during evolution and are found in a wide variety of organisms. One such feature is the “CCAAT” sequence element (Edwards et al, 1998, Plant Physiol. 117:1015-1022). CCAAT boxes are a feature of gene promoters in many eukaryotes including several plant gene promoters.

[0012] HAP proteins constitute a large family of transcription factors first identified in yeast. They combine to from a heteromeric protein complex that activates transcription by binding to CCAAT boxes in eukaryotic promoters. The orthologous HAP proteins display a high degree of evolutionary conservation in their functional domains in all species studied to date (Li et al., 1991, Nucleic Acids Res. 20:1087-1091).

[0013] WO 00/28058 published on May 18, 2000 describes HAP3-type CCAAT-box binding transcriptional activator polynucleotides and polypeptides, especially, the leafy cotyledon 1 transcriptional activator (LEC1) polynucleotides and polypeptides.

[0014] WO 99/67405 describes leafy cotyledon1 genes and their uses.

[0015] The human, murine and plant homologues of CCAAT-binding proteins have been isolated and characterized based on their sequence similarity with their yeast counterparts (Li et al., 1991, Nucleic Acids Res. 20:1087-1091). This high degree of sequence homology translates remarkably into functional interchangeability among orthologue proteins of different species (Sinha et al, 1995, Proc. Natl. Acad. Sci. USA 92:1624-1628). Unlike yeast, multiple forms of each HAP homolog have been identified in plants (Edwards et al, 1998, Plant Physiol. 117:1015-1022).

[0016] Molecular and genetic analysis revealed HAP members to be involved in the control of diverse and critical biological processes ranging from development and cell cycle regulation to metabolic control and homeostasis (Lotan et al, 1998, Cell 93:1195-1205; Lopez et al, 1996, Proc. Natl. Acad. Sci. USA 93:1049-1053). In yeast, HAPs are involved in the transcriptional control of metabolic processes such as the regulation of catabolic derepression of cyc1 and other genes involved in respiration (Becker et al., 1991, Proc. Natl. Acad. Sci. USA 88:1968-1972).

[0017] In mammalian systems, several reports describe HAPs as direct or indirect regulators of several important genes involved in lipid biosynthesis such as fatty acid synthase (Roder et al, 1997, Gene 184:21-26), farnesyl diphosphate (FPP) synthase (Jackson et al, 1995, J. Biol. Chem. 270:21445-21448; Ericsson et al, 1996, J. Biol. Chem. 217:24359-24364), glycerol-3-phosphate acyltransferase (GPA, Jackson et al, 1997), acetyl-CoA carboxylase (ACC, Lopez et al, 1996, Proc. Natl. Acad. Sci. USA 93:1049-1053) and 3-hydroxy-3-methylglutaryl-coenzyme A (HMG-CoA) synthase (Jackson et al, 1995, J. Biol. Chem. 270:21445-21448), among others.

[0018] In addition, other CCAAT-binding transcription factors have also been reported to be involved in different aspects of the control of lipid biosynthesis and adipocyte growth and differentiation in mammalian systems (see McKnight et al, 1989).

[0019] It appears that the currently available evidence to date points to a family of proteins of the CCAAT-binding transcription factors as important modulators of metabolism and lipid biosynthesis in mammalian systems. Such a determination has not been made for plant systems.

[0020] Other polypeptides that influence ovule and embryo development and stimulate cell growth, such as, Led, Kn1, WUSCHEL, Zwille and Aintegumeta (ANT) allow for increased transformation efficiencies when expressed in plants. See, for example, U.S. Application No. 2003/0135889, herein incorporated by reference. In fact, a maize Led homologue of the Arabidopsis embryogenesis controlling gene AtLEC1, has been shown to increase oil content and transformation efficiencies in plants. See, for example, WO 03001902 and U.S. Pat. No. 6,512,165.

[0021] The putative AP2/EREBP transcription factor WRINKLED1 (WR11) is involved in the regulation of seed storage metabolism in Arabidopsis (Cermac and Benning, 2004, Plant J. 40:575-585). Expression of the WR11 cDNA under the control of the CaMV 35S promoter led to increased seed oil content. Oil-accumulating seedlings, however, showed aberrant development consistent with a prolonged embryonic state. Nucleic acid molecules encoding WRINKLED1-LIKE polypeptides and methods of use are also described in International Publication No. WO 2006/00732 A2.

[0022] Because transcription factors regulate transcription and orchestrate gene expression in plants and other organisms, control of transcription factor gene expression provides a powerful means for altering plant phenotype. The transformation of plants with transcription factors, however, can result in aberrant development based on the overexpression and/or ectopic expression of the transcription factor. In the current invention, it has been found that use of a seed specific promoter, such as SUS2 from Arabidopsis, can drive expression of an ODP1 gene thereby increasing oil content in the seeds of a cruciferous oilseed plant without negatively affecting germination and seedling establishment.

### SUMMARY OF THE INVENTION

[0023] In a first embodiment, the present invention concerns a recombinant DNA construct comprising a polynucleotide encoding an ODP1 polypeptide operably linked to a sucrose synthase 2 promoter wherein said construct increases oil content in the seeds of a cruciferous oilseed plant while maintaining normal germination and further wherein the amino acid sequence of said ODP1 polypeptide has at least 80%, at least 90%, at least 95% or 100% sequence identity to a sequence selected from the group consisting of SEQ ID NO:37, SEQ ID NO:39, and SEQ ID NO:41.

[0024] In another embodiment, the present invention concerns a recombinant construct comprising a sucrose synthase 2 promoter which comprises: (a) the nucleotide sequence of SEQ ID NO:43, SEQ ID NO:72 or SEQ ID NO:73, or (b) a nucleotide sequence comprising a functional fragment of the nucleotide sequence of SEQ ID NO:43, SEQ ID NO:72 or SEQ ID NO:73.

[0025] In another embodiment, the present invention concerns a transgenic cruciferous oilseed plant comprising in its genome the recombinant DNA construct of the invention. Also included are transgenic seeds obtained from such transgenic cruciferous oilseed plants, wherein the transgenic seed comprises in its genome the recombinant DNA construct of the invention.

[0026] In another embodiment, the present invention concerns a method for producing a transgenic cruciferous oilseed plant comprising transforming a cruciferous oilseed plant cell with the recombinant construct of the invention and regenerating a transgenic plant from the transformed plant cell, wherein the transgenic cruciferous oilseed plant comprises in its genome the recombinant DNA construct of the invention.

[0027] In another embodiment, the present invention concerns a method for increasing oil content in seeds of a transgenic cruciferous oilseed plant while maintaining normal germination, said method comprising:
[0028] (a) transforming a cruciferous oilseed plant cell with a recombinant DNA construct comprising a polynucleotide encoding an ODP1 polypeptide, wherein the amino acid sequence of said ODP1 polypeptide has at least 80%, at least 90% or at least 95% sequence identity with a sequence selected from the group consisting of SEQ ID NO:37, SEQ ID NO:39, and SEQ ID NO:41, said sequence being operably linked to a seed specific promoter;
[0029] (b) regenerating a transgenic cruciferous oilseed plant from the transformed cell of step (a), wherein said plant comprises the recombinant DNA construct;
[0030] (c) (c) obtaining a transgenic progeny plant derived from the transgenic cruciferous oilseed plant of step (b), wherein the transgenic progeny plant comprises in its genome the recombinant DNA construct;
[0031] (d) assaying the transgenic progeny plant obtained from step (c) for oil level and germination; and
[0032] (e) selecting those transgenic progeny plants having seeds with an increased level of oil and normal germination when compared to seeds obtained from a control cruciferous oilseed plant, wherein said control plant does not comprise the recombinant DNA construct.

[0033] In another embodiment, the present invention concerns a method of the invention wherein the ODP1 polypeptide is a maize ODP1 polypeptide and, more specifically, the amino acid sequence of the ODP1 polypeptide comprises the sequence of SEQ ID NO:37. In addition, the seed specific promoter can be a sucrose synthase 2 promoter and, more specifically, the nucleotide sequence of sucrose synthase 2 promoter comprises (a) the nucleotide sequence of SEQ ID NO:43, SEQ ID NO:72 or SEQ ID NO:73; or (b) a nucleotide sequence comprising a functional fragment of the nucleotide sequence of SEQ ID NO:43, SEQ ID NO:72 or SEQ ID NO:73.

[0034] In another embodiment, the present invention concerns oil or by-products obtained from transgenic seed of the invention.

[0035] In another embodiment, the cruciferous oilseed plant or seed of any of the compositions or methods of the present invention can be canola or Arabidopsis or other plant species including but not limited to the following: Barbarea vulgaris, Brassica campestris, Brassica carinata, Brassica elongate, Brassica fruticulosa, Brassica hirta, Brassica juncea, Brassica napus, Brassica narinosa, Brassica nigra, Brassica oleracea, Brassica perviridis, Brassica rapa, Brassica rupestris, Brassica septiceps, Brassica tournefortii, Brassica verna, Camelina sativa, Crambe abyssinica, Lepidium campestre, Raphanus sativus, Sinapis alba.

### BRIEF DESCRIPTION OF THE DRAWINGS AND SEQUENCE LISTING

[0036] The invention can be more fully understood from the following detailed description and the accompanying drawings and Sequence Listing which form a part of this application.

[0037] FIG. 1A-1C show a multiple alignment of the ODP1 polypeptides of Zea mays (SEQ ID NO:37), Glycine max (SEQ ID NO:39), Momordica charantia (SEQ ID NO:41), and the WRINKLED1 gene from Arabidopsis thaliana (SEQ ID NO:42; NCBI GI NO. 32364685). The multiple alignment was assembled using the Clustal V method of alignment with the default parameters. Residues that match SEQ ID NO:37 exactly are enclosed in a box. Above the alignment is shown a consensus sequence. A residue is shown in the consensus sequence when all residues at that position are identical.

[0038] FIG. 2 shows the percent sequence identity and divergence for each pair of polypeptides from the multiple alignment of FIG. 1A-1C.

[0039] SEQ ID NO:1 is the nucleotide sequence of vector pKS121/BS.

[0040] SEQ ID NO:2 is the nucleotide sequence of vector pDsRedxKS121/BS.

[0041] SEQ ID NO:3 is the nucleotide sequence of vector pKS332,

[0042] SEQ ID NO:4 is the nucleotide sequence of PCR primer MWG345.

[0043] SEQ ID NO:5 is the nucleotide sequence of PCR primer MWG346.

[0044] SEQ ID NO:6 is the nucleotide sequence of vector pKS336,

[0045] SEQ ID NO:7 is the nucleotide sequence of the T-DNA of the plant transformation vector pZBL120xKS336.

[0046] SEQ ID NO:8 is the nucleotide sequence of PCR primer MWG339.

[0047] SEQ ID NO:9 is the nucleotide sequence of PCR primer MWG340.

[0048] SEQ ID NO:10 is the nucleotide sequence of vector pKS333.

[0049] SEQ ID NO:11 is the nucleotide sequence of the T-DNA of the plant transformation vector pZBL120xKS333.

[0050] SEQ ID NO:12 is the nucleotide sequence of PCR primer MWG341.

[0051] SEQ ID NO:13 is the nucleotide sequence of PCR primer MWG342.

[0052] SEQ ID NO:14 is the nucleotide sequence of vector pKS334.

[0053] SEQ ID NO:15 is the nucleotide sequence of the T-DNA of the plant transformation vector pZBL120xKS334.

[0054] SEQ ID NO:16 is the nucleotide sequence of vector pKR132.

[0055] SEQ ID NO:17 is the nucleotide sequence of vector pKR627.

[0056] SEQ ID NO:18 is the nucleotide sequence of vector KS294.

[0057] SEQ ID NO:19 is the nucleotide sequence of vector pKR1142.

[0058] SEQ ID NO:20 is the nucleotide sequence of vector pKR1141.

[0059] SEQ ID NO:21 is the nucleotide sequence of PCR primer SuSy-5.

[0060] SEQ ID NO:22 is the nucleotide sequence of PCR primer SuSy-3.

[0061] SEQ ID NO:23 is the nucleotide sequence of vector pLF122.

[0062] SEQ ID NO:24 is the nucleotide sequence of vector pKR1155.

[0063] SEQ ID NO:25 is the nucleotide sequence of vector pKR1158.

[0064] SEQ ID NO:26 is the nucleotide sequence of vector pKR1167.

[0065] SEQ ID NO:27 is the nucleotide sequence of vector pKR92.

[0066] SEQ ID NO:28 is the nucleotide sequence of vector pKR1223.

[0067] SEQ ID NO:29 is the nucleotide sequence of vector pKR268.

[0068] SEQ ID NO:30 is the nucleotide sequence of vector pKR1143.

[0069] SEQ ID NO:31 is the nucleotide sequence of vector pKR1147.

[0070] SEQ ID NO:32 is the nucleotide sequence of vector pKR1220.

[0071] SEQ ID NO:33 is the nucleotide sequence of vector pKR1144.

[0072] SEQ ID NO:34 is the nucleotide sequence of vector pKR1149.

[0073] SEQ ID NO:35 is the nucleotide sequence of vector pKR1221.

[0074] SEQ ID NO:36 is the nucleotide sequence of the maize ODP1 coding region from cDNA clone cde1c.pk003.o22.

[0075] SEQ ID NO:37 is the amino acid sequence of the maize ODP1 encoded by

[0076] SEQ ID NO:36. SEQ ID NO:37 is identical to SEQ ID NO:320 in U.S. Pat. No. 7,157,621.

[0077] SEQ ID NO:38 is the nucleotide sequence of the soybean ODP1 coding region from cDNA clone se3.pk0003.f5.

[0078] SEQ ID NO:39 is the amino acid sequence of the soybean ODP1 encoded by SEQ ID NO:38. SEQ ID NO:39 is identical to SEQ ID NO:481 in U.S. Pat. No. 7,157,621.

[0079] SEQ ID NO:40 is the nucleotide sequence of the Momordica charantia ODP1 coding region from cDNA clone fds1n.pk015.115.

[0080] SEQ ID NO:41 is the amino acid sequence of the Momordica charantia ODP1 encoded by SEQ ID NO:40. SEQ ID NO:41 is identical to SEQ ID NO:477 in U.S. Pat. No. 7,157,621.

[0081] SEQ ID NO:42 is the amino acid sequence of WRINKLED1 (WR11) from Arabidopsis thaliana and corresponds to NCBI GI NO. 32364685.

[0082] SEQ ID NO:43 is the nucleotide sequence of the sucrose synthase 2 (SUS2) promoter from Arabidopsis thaliana that is present in vector pKR1223.

[0083] SEQ ID NO:44 is the nucleotide sequence of the canola SUS2 homolog.

[0084] SEQ ID NO:45 is the amino acid sequence of the canola SUS2 homolog encoded by SEQ ID NO:44.

[0085] SEQ ID NO:46 is the nucleotide sequence of primer a.

[0086] SEQ ID NO:47 is the nucleotide sequence of primer b.

[0087] SEQ ID NO:48 is the nucleotide sequence of primer c.

[0088] SEQ ID NO:49 is the nucleotide sequence of primer d.

[0089] SEQ ID NO:50 is the nucleotide sequence of “PvuII rapa cons”, a genomic sequence of canola variety NS1822BC that was generated with primers a and b.

[0090] SEQ ID NO:51 is the nucleotide sequence of “1,6 DraI gene cons”, a genomic sequence of canola variety NS1822BC that was generated with primers c and d.

[0091] SEQ ID NO:52 is the nucleotide sequence of primer SA188.

[0092] SEQ ID NO:53 is the nucleotide sequence of primer SA189.

[0093] SEQ ID NO:54 is the nucleotide sequence of primer SA190.

[0094] SEQ ID NO:55 is the nucleotide sequence of primer SA191.

[0095] SEQ ID NO:56 is the nucleotide sequence of “BN SUS2 prom1/PCR blunt”, which is derived from 1,6 DraI gene cons (SEQ ID NO:51).

[0096] SEQ ID NO:57 is the nucleotide sequence of “BN SUS2 prom2/PCR blunt”, which is derived from PvuII rapa cons (SEQ ID NO:50).

[0097] SEQ ID NO:58 is the nucleotide sequence of vector KS427.

[0098] SEQ ID NO:59 is the nucleotide sequence of vector KS130.

[0099] SEQ ID NO:60 is the nucleotide sequence of vector KS432.

[0100] SEQ ID NO:61 is the nucleotide sequence of vector ARALO80,

[0101] SEQ ID NO:62 is the nucleotide sequence of primer D6 fwd.

[0102] SEQ ID NO:63 is the nucleotide sequence of primer D6 rev,

[0103] SEQ ID NO:64 is the nucleotide sequence of vector KS119.

[0104] SEQ ID NO:65 is the nucleotide sequence of vector KS430.

[0105] SEQ ID NO:66 is the nucleotide sequence of vector ARALO78.

[0106] SEQ ID NO:67 is the nucleotide sequence of vector KS428.

[0107] SEQ ID NO:68 is the nucleotide sequence of vector KS429.

[0108] SEQ ID NO:69 is the nucleotide sequence of vector ARALO77.

[0109] SEQ ID NO:70 is the nucleotide sequence of vector KS431.

[0110] SEQ ID NO:71 is the nucleotide sequence of vector ARALO79.

[0111] SEQ ID NO:72 is the nucleotide sequence of the sucrose synthase 2-1 (BnSUS2-1) promoter from Brassica napus that is present in BN SUS2 prom1/PCR blunt.

[0112] SEQ ID NO:73 is the nucleotide sequence of the sucrose synthase 2-2 (BnSUS2-2) promoter from Brassica napus that is present in BN SUS2 prom2/PCR blunt.

[0113] The sequence descriptions and Sequence Listing attached hereto comply with the rules governing nucleotide and/or amino acid sequence disclosures in patent applications as set forth in 37 C.F.R. §1.821-1.825.

[0114] The Sequence Listing contains the one letter code for nucleotide sequence characters and the three letter codes for amino acids as defined in conformity with the IUPAC-IUBMB standards described in Nucleic Acids Res. 13:3021-3030 (1985) and in the Biochemical J. 219 (No. 2):345-373 (1984) which are herein incorporated by reference. The symbols and format used for nucleotide and amino acid sequence data comply with the rules set forth in 37 C.F.R. §1.822.

### DETAILED DESCRIPTION OF THE INVENTION

[0115] All patents, patent applications, and publications cited herein are incorporated by reference in their entirety.

[0116] As used herein and in the appended claims, the singular forms “a”, “an”, and “the” include plural reference unless the context clearly dictates otherwise. Thus, for example, reference to “a plant” includes a plurality of such plants, reference to “a cell” includes one or more cells and equivalents thereof known to those skilled in the art, and so forth.

[0117] Units, prefixes, and symbols may be denoted in their SI accepted form. Unless otherwise indicated, nucleic acids are written left to right in 5′ to 3′ orientation; amino acid sequences are written left to right in amino to carboxyl orientation, respectively. Numeric ranges recited within the specification are inclusive of the numbers defining the range and include each integer within the defined range. Amino acids may be referred to herein by either commonly known three letter symbols or by the one-letter symbols recommended by the IUPAC-IUB Biochemical Nomenclature Commission. Nucleotides, likewise, may be referred to by their commonly accepted single-letter codes. Unless otherwise provided for, software, electrical, and electronics terms as used herein are as defined in The New IEEE Standard Dictionary of Electrical and Electronics Terms (5^{th} edition, 1993). The terms defined below are more fully defined by reference to the specification as a whole.

[0118] In the context of this disclosure, a number of terms and abbreviations are used. The following definitions are provided.

[0119] The term “ODP1” refers to an ovule development protein 1 that is involved with increasing oil content.

[0120] The term “sucrose synthase” (SUS) refers to an enzyme used in carbohydrate metabolism that catalyzes the reversible conversion of sucrose and uridine diphosphate (UDP) to UDP-glucose and fructose in vitro. The terms “Arabidopsis sucrose synthase 2”, “AtSuSy” and “AtSUS2”) are used interchangeably herein. The Arabidopsis sucrose synthase 2 gene is from genomic locus At5g49190,

[0121] The term “germination” refers to the initial stages in the growth of a seed to form a seedling.

[0122] The term “recombinant” refers to an artificial combination of two otherwise separated segments of sequence, e.g., by chemical synthesis or by the manipulation of isolated segments of nucleic acids by genetic engineering techniques.

[0123] The terms “recombinant construct”, “expression construct”, “chimeric construct”, “construct”, and “recombinant DNA construct” are used interchangeably herein. A recombinant construct comprises an artificial combination of nucleic acid fragments, e.g., regulatory and coding sequences that are not found together in nature. For example, a chimeric construct may comprise regulatory sequences and coding sequences that are derived from different sources, or regulatory sequences and coding sequences derived from the same source, but arranged in a manner different than that found in nature. Such a construct may be used by itself or may be used in conjunction with a vector. If a vector is used, then the choice of vector is dependent upon the method that will be used to transform host cells as is well known to those skilled in the art. For example, a plasmid vector can be used. The skilled artisan is well aware of the genetic elements that must be present on the vector in order to successfully transform, select and propagate host cells comprising any of the isolated nucleic acid fragments of the invention. The skilled artisan will also recognize that different independent transformation events will result in different levels and patterns of expression (Jones et al., EMBO J. 4:2411-2418 (1985); De Almeida et al., Mol. Gen. Genetics 218:78-86 (1989)), and thus that multiple events must be screened in order to obtain lines displaying the desired expression level and pattern. Such screening may be accomplished by Southern analysis of DNA, Northern analysis of mRNA expression, immunoblotting analysis of protein expression, or phenotypic analysis, among others.

[0124] This construct may comprise any combination of deoxyribonucleotides, ribonucleotides, and/or modified nucleotides. The construct may be transcribed to form an RNA, wherein the RNA may be capable of forming a double-stranded RNA and/or hairpin structure. This construct may be expressed in the cell, or isolated or synthetically produced. The construct may further comprise a promoter, or other sequences which facilitate manipulation or expression of the construct.

[0125] As used herein, “encodes” or “encoding” refers to a DNA sequence which can be processed to generate an RNA and/or polypeptide.

[0126] As used herein, “expression” or “expressing” refers to production of a functional product, such as, the generation of an RNA transcript from an introduced construct, an endogenous DNA sequence, or a stably incorporated heterologous DNA sequence. The term may also refer to a polypeptide produced from an mRNA generated from any of the above DNA precursors. Thus, expression of a nucleic acid fragment may refer to transcription of the nucleic acid fragment (e.g., transcription resulting in mRNA or other functional RNA) and/or translation of RNA into a precursor or mature protein (polypeptide).

[0127] As used herein, “heterologous” with respect to a sequence means a sequence that originates from a foreign species, or, if from the same species, is substantially modified from its native form in composition and/or genomic locus by deliberate human intervention. For example, with respect to a nucleic acid, it can be a nucleic acid that originates from a foreign species, or is synthetically designed, or, if from the same species, is substantially modified from its native form in composition and/or genomic locus by deliberate human intervention. A heterologous protein may originate from a foreign species or, if from the same species, is substantially modified from its original form by deliberate human intervention.

[0128] “Plant” includes reference to whole plants, plant organs, plant tissues, seeds and plant cells and progeny of same. Plant cells include, without limitation, cells from seeds, suspension cultures, embryos, meristematic regions, callus tissue, leaves, roots, shoots, gametophytes, sporophytes, pollen, and microspores.

[0129] The term “plant parts” includes differentiated and undifferentiated tissues including, but not limited to the following: roots, stems, shoots, leaves, pollen, seeds, tumor tissue and various forms of cells and culture (e.g., single cells, protoplasts, embryos and callus tissue). The plant tissue may be in plant or in a plant organ, tissue or cell culture.

[0130] The term “plant organ” refers to plant tissue or group of tissues that constitute a morphologically and functionally distinct part of a plant.

[0131] “Progeny” comprises any subsequent generation of a plant. Progeny will inherit, and stably segregate, genes and transgenes from its parent plant(s).

[0132] The term “introduced” means providing a nucleic acid (e.g., expression construct) or protein into a cell. Introduced includes reference to the incorporation of a nucleic acid into a eukaryotic or prokaryotic cell where the nucleic acid may be incorporated into the genome of the cell, and includes reference to the transient provision of a nucleic acid or protein to the cell. Introduced includes reference to stable or transient transformation methods, as well as sexually crossing. Thus, “introduced” in the context of inserting a nucleic acid fragment (e.g., a recombinant DNA construct/expression construct) into ac ell, means “transfection” or “transformation” or “transduction” and includes reference to the incorporation of a nucleic acid fragment into a eukaryotic or prokaryotic cell where the nucleic acid fragment may be incorporated into the genome of the cell (e.g., chromosome, plasmid, plastid or mitochondrial DNA), converted into an autonomous replicon, or transiently expressed (e.g., transfected mRNA).

[0133] The term “genome” as it applies to a plant cells encompasses not only chromosomal DNA found within the nucleus, but organelle DNA found within subcellular components (e.g., mitochondrial, plastid) of the cell.

[0134] The term “isolated” refers to material, such as a nucleic acid or a protein, which is: (1) substantially or essentially free from components which normally accompany or interact with the material as found in its naturally occurring environment or (2) if the material is in its natural environment, the material has been altered by deliberate human intervention to a composition and/or placed at a locus in the cell other than the locus native to the material.

[0135] As used herein, “nucleic acid” means a polynucleotide and includes single or double-stranded polymer of deoxyribonucleotide or ribonucleotide bases. Nucleic acids may also include fragments and modified nucleotides. Thus, the terms “polynucleotide”, “nucleic acid sequence”, “nucleotide sequence” or “nucleic acid fragment” are used interchangeably and is a polymer of RNA or DNA that is single- or double-stranded, optionally containing synthetic, non-natural or altered nucleotide bases. Nucleotides (usually found in their 5′-monophosphate form) are referred to by their single letter designation as follows: “A” for adenylate or deoxyadenylate (for RNA or DNA, respectively), “C” for cytidylate or deosycytidylate, “G” for guanylate or deoxyguanylate, “U” for uridlate, “T” for deosythymidylate, “R” for purines (A or G), “Y” for pyrimidines (C or T), “K” for G or T, “H” for A or C or T, “I” for inosine, and “N” for any nucleotide.

[0136] The terms “subfragment that is functionally equivalent” and “functionally equivalent subfragment” are used interchangeably herein. These terms refer to a portion or subsequence of an isolated nucleic acid fragment in which the ability to alter gene expression or produce a certain phenotype is retained whether or not the fragment or subfragment encodes an active enzyme. For example, the fragment or subfragment can be used in the design of chimeric genes to produce the desired phenotype in a transformed plant. Chimeric genes can be designed for use in suppression by linking a nucleic acid fragment or subfragment thereof, whether or not it encodes an active enzyme, in the sense or antisense orientation relative to a plant promoter sequence.

[0137] The term “conserved domain” or “motif” means a set of amino acids conserved at specific positions along an aligned sequence of evolutionarily related proteins. While amino acids at other positions can vary between homologous proteins, amino acids that are highly conserved at specific positions indicate amino acids that are essential in the structure, the stability, or the activity of a protein. Because they are identified by their high degree of conservation in aligned sequences of a family of protein homologues, they can be used as identifiers, or “signatures”, to determine if a protein with a newly determined sequence belongs to a previously identified protein family.

[0138] The terms “homology”, “homologous”, “substantially similar” and “corresponding substantially” are used interchangeably herein. They refer to nucleic acid fragments wherein changes in one or more nucleotide bases do not affect the ability of the nucleic acid fragment to mediate gene expression or produce a certain phenotype. These terms also refer to modifications of the nucleic acid fragments of the instant invention such as deletion or insertion of one or more nucleotides that do not substantially alter the functional properties of the resulting nucleic acid fragment relative to the initial, unmodified fragment. It is therefore understood, as those skilled in the art will appreciate, that the invention encompasses more than the specific exemplary sequences.

[0139] “Sequence identity” or “identity” in the context of nucleic acid or polypeptide sequences refers to the nucleic acid bases or amino acid residues in two sequences that are the same when aligned for maximum correspondence over a specified comparison window.

[0140] Thus, “percentage of sequence identity” refers to the value determined by comparing two optimally aligned sequences over a comparison window, wherein the portion of the polynucleotide or polypeptide sequence in the comparison window may comprise additions or deletions (i.e., gaps) as compared to the reference sequence (which does not comprise additions or deletions) for optimal alignment of the two sequences. The percentage is calculated by determining the number of positions at which the identical nucleic acid base or amino acid residue occurs in both sequences to yield the number of matched positions, dividing the number of matched positions by the total number of positions in the window of comparison and multiplying the results by 100 to yield the percentage of sequence identity. Useful examples of percent sequence identities include, but are not limited to, 50%, 55%, 60%, 65%, 70%, 75%, 80%, 85%, 90%, or 95%, or any integer percentage from 50% to 100%. These identities can be determined using any of the programs described herein.

[0141] Sequence alignments and percent identity or similarity calculations may be determined using a variety of comparison methods designed to detect homologous sequences including, but not limited to, the MegAlign™ program of the LASERGENE bioinformatics computing suite (DNASTAR Inc., Madison, Wis.). Within the context of this application it will be understood that where sequence analysis software is used for analysis, that the results of the analysis will be based on the “default values” of the program referenced, unless otherwise specified. As used herein “default values” will mean any set of values or parameters that originally load with the software when first initialized.

[0142] The “Clustal V method of alignment” corresponds to the alignment method labeled Clustal V (described by Higgins and Sharp, CABIOS. 5:151-153 (1989); Higgins, D. G. et al. (1992) Comput. Appl. Biosci. 8:189-191) and found in the MEGALIGN™ program of the LASERGENE bioinformatics computing suite (DNASTAR Inc., Madison, Wis.). For multiple alignments, the default values correspond to GAP PENALTY=10 and GAP LENGTH PENALTY=10. Default parameters for pairwise alignments and calculation of percent identity of protein sequences using the Clustal method are KTUPLE=1, GAP PENALTY=3, WINDOW=5 and DIAGONALS SAVED=5. For nucleic acids these parameters are KTUPLE=2, GAP PENALTY=5, WINDOW=4 and DIAGONALS SAVED=4. After alignment of the sequences using the Clustal V program, it is possible to obtain a “percent identity” by viewing the “sequence distances” table in the same program.

[0143] “BLASTN method of alignment” is an algorithm provided by the National Center for Biotechnology Information (NCBI) to compare nucleotide sequences using default parameters.

[0144] It is well understood by one skilled in the art that many levels of sequence identity are useful in identifying polypeptides, from other species, wherein such polypeptides have the same or similar function or activity. Useful examples of percent identities include, but are not limited to, 50%, 55%, 60%, 65%, 70%, 75%, 80%, 85%, 90%, or 95%, or any integer percentage from 50% to 100%. Indeed, any integer amino acid identity from 50% to 100% may be useful in describing the present invention, such as 51%, 52%, 53%, 54%, 55%, 56%, 57%, 58%, 59%, 60%, 61%, 62%, 63%, 64%, 65%, 66%, 67%, 68%, 69%, 70%, 71%, 72%, 73%, 74%, 75%, 76%, 77%, 78%, 79%, 80%, 81%, 82%, 83%, 84%, 85%, 86%, 87%, 88%, 89%, 90%, 91%, 92%, 93%, 94%, 95%, 96%, 97%, 98% or 99%. Also, of interest is any full-length or partial complement of this isolated nucleotide fragment.

[0145] “Gene” refers to a nucleic acid fragment that expresses a specific protein, including regulatory sequences preceding (5′ non-coding sequences) and following (3′ non-coding sequences) the coding sequence. “Native gene” refers to a gene as found in nature with its own regulatory sequences. “Chimeric gene” refers to any gene that is not a native gene, comprising regulatory and coding sequences that are not found together in nature. Accordingly, a chimeric gene may comprise regulatory sequences and coding sequences that are derived from different sources, or regulatory sequences and coding sequences derived from the same source, but arranged in a manner different than that found in nature. A “foreign” gene refers to a gene not normally found in the host organism, but that is introduced into the host organism by gene transfer. Foreign genes can comprise native genes inserted into a non-native organism, or chimeric genes. A “transgene” is a gene that has been introduced into the genome by a transformation procedure.

[0146] The term “genome” as it applies to a plant cells encompasses not only chromosomal DNA found within the nucleus, but organelle DNA found within subcellular components (e.g., mitochondrial, plastid) of the cell.

[0147] “Coding sequence” refers to a DNA sequence that codes for a specific amino acid sequence. “Regulatory sequences” refer to nucleotide sequences located upstream (5′ non-coding sequences), within, or downstream (3′ non-coding sequences) of a coding sequence, and which influence the transcription, RNA processing or stability, or translation of the associated coding sequence. Regulatory sequences may include, but are not limited to: promoters, translation leader sequences, introns, polyadenylation recognition sequences, RNA processing sites, effector binding sites and stem-loop structures.

[0148] “Promoter” refers to a DNA sequence capable of controlling the expression of a coding sequence or functional RNA. The promoter sequence consists of proximal and more distal upstream elements, the latter elements often referred to as enhancers. Accordingly, an “enhancer” is a DNA sequence that can stimulate promoter activity, and may be an innate element of the promoter or a heterologous element inserted to enhance the level or tissue-specificity of a promoter. Promoters may be derived in their entirety from a native gene, or be composed of different elements derived from different promoters found in nature, or even comprise synthetic DNA segments. It is understood by those skilled in the art that different promoters may direct the expression of a gene in different tissues or cell types, or at different stages of development, or in response to different environmental conditions. It is further recognized that since in most cases the exact boundaries of regulatory sequences have not been completely defined, DNA fragments of some variation may have identical promoter activity. Promoters that cause a gene to be expressed in most cell types at most times are commonly referred to as “constitutive promoters”. New promoters of various types useful in plant cells are constantly being discovered; numerous examples may be found in the compilation by Okamuro, J. K., and Goldberg, R. B. Biochemistry of Plants 15:1-82 (1989).

[0149] “Functional variants” of the regulatory sequences (e.g., promoters) are also encompassed by the compositions of the present invention. Functional variants include, for example, the native regulatory sequences of the invention having one or more nucleotide substitutions, deletions or insertions. Functional variants of the invention may be created by site-directed nutagenesis, induced mutation, or may occur as allelic variants (polymorphisms).

[0150] As used herein, a “functional fragment” of a regulatory sequence (e.g. a promoter) is a functional variant formed by one or more deletions from a larger regulatory element. For example, the 5′ portion of a sequence with promoter activity may be deleted without abolishing promoter activity, as described by Zhu et al., Plant Cell 7:1681-1689 (1995). Such variants should retain promoter activity, particularly the ability to drive expression in seed or seed tissues. Activity can be measured by Northern blot analysis, reporter activity measurements when using transcriptional fusions, and the like. See, for example, Sambrook et al. (1989) Molecular Cloning: A Laboratory Manual (2^{nd} ed., Cold Spring Harbor Laboratory, Cold Spring Harbor, N.Y.).

[0151] “Translation leader sequence” refers to a polynucleotide sequence located between the promoter sequence of a gene and the coding sequence. The translation leader sequence is present in the fully processed mRNA upstream of the translation start sequence. The translation leader sequence may affect processing of the primary transcript to mRNA, mRNA stability or translation efficiency. Examples of translation leader sequences have been described (Turner, R. and Foster, G. D., Mol. Biotechnol. 3:225-236 (1995)).

[0152] “3′ non-coding sequences”, “transcription terminator” or “termination sequences” refer to DNA sequences located downstream of a coding sequence and include polyadenylation recognition sequences and other sequences encoding regulatory signals capable of affecting mRNA processing or gene expression. The polyadenylation signal is usually characterized by affecting the addition of polyadenylic acid tracts to the 3′ end of the mRNA precursor. The use of different 3′ non-coding sequences is exemplified by Ingelbrecht, I. L., et al. Plant Cell 1:671-680 (1989).

[0153] “RNA transcript” refers to the product resulting from RNA polymerase-catalyzed transcription of a DNA sequence. When the RNA transcript is a perfect complementary copy of the DNA sequence, it is referred to as the primary transcript. A RNA transcript is referred to as the mature RNA when it is a RNA sequence derived from post-transcriptional processing of the primary transcript. “Messenger RNA” or “mRNA” refers to the RNA that is without introns and that can be translated into protein by the cell. “cDNA” refers to a DNA that is complementary to, and synthesized from, a mRNA template using the enzyme reverse transcriptase. The cDNA can be single-stranded or converted into double-stranded form using the Klenow fragment of DNA polymerase I. “Sense” RNA refers to RNA transcript that includes the mRNA and can be translated into protein within a cell or in vitro. “Antisense RNA” refers to an RNA transcript that is complementary to all or part of a target primary transcript or mRNA, and that blocks the expression of a target gene (U.S. Pat. No. 5,107,065). The complementarity of an antisense RNA may be with any part of the specific gene transcript, i.e., at the 5′ non-coding sequence, 3′ non-coding sequence, introns, or the coding sequence. “Functional RNA” refers to antisense RNA, ribozyme RNA, or other RNA that may not be translated but yet has an effect on cellular processes. The terms “complement” and “reverse complement” are used interchangeably herein with respect to mRNA transcripts, and are meant to define the antisense RNA of the message.

[0154] The term “operably linked” refers to the association of nucleic acid sequences on a single nucleic acid fragment so that the function of one is regulated by the other. For example, a promoter is operably linked with a coding sequence when it is capable of regulating the expression of that coding sequence (i.e., the coding sequence is under the transcriptional control of the promoter). Coding sequences can be operably linked to regulatory sequences in a sense or antisense orientation. In another example, the complementary RNA regions of the invention can be operably linked, either directly or indirectly, 5′ to the target mRNA, or 3′ to the target mRNA, or within the target mRNA, or a first complementary region is 5′ and its complement is 3′ to the target mRNA.

[0155] Standard recombinant DNA and molecular cloning techniques used herein are well known in the art and are described more fully in Sambrook, J., Fritsch, E. F. and Maniatis, T. Molecular Cloning: A Laboratory Manual; Cold Spring Harbor Laboratory: Cold Spring Harbor, N.Y. (1989). Transformation methods are well known to those skilled in the art and are described infra.

[0156] “PCR” or “polymerase chain reaction” is a technique for the synthesis of large quantities of specific DNA segments and consists of a series of repetitive cycles (Perkin Elmer Cetus Instruments, Norwalk, Conn.). Typically, the double-stranded DNA is heat denatured, the two primers complementary to the 3′ boundaries of the target segment are annealed at low temperature and then extended at an intermediate temperature. One set of these three consecutive steps is referred to as a “cycle”.

[0157] The terms “plasmid”, “vector” and “cassette” refer to an extra chromosomal element often carrying genes that are not part of the central metabolism of the cell, and usually in the form of circular double-stranded DNA fragments. Such elements may be autonomously replicating sequences, genome integrating sequences, phage or nucleotide sequences, linear or circular, of a single- or double-stranded DNA or RNA, derived from any source, in which a number of nucleotide sequences have been joined or recombined into a unique construction which is capable of introducing a promoter fragment and DNA sequence for a selected gene product along with appropriate 3′ untranslated sequence into a cell. “Transformation cassette” refers to a specific vector containing a foreign gene and having elements in addition to the foreign gene that facilitates transformation of a particular host cell. “Expression cassette” refers to a specific vector containing a foreign gene and having elements in addition to the foreign gene that allow for enhanced expression of that gene in a foreign host (i.e., to a discrete nucleic acid fragment into which a nucleic acid sequence or fragment can be moved.)

[0158] The term “expression”, as used herein, refers to the production of a functional end-product (e.g., a mRNA or a protein [either precursor or mature]).

[0159] “Stable transformation” refers to the transfer of a nucleic acid fragment into a genome of a host organism, including both nuclear and organellar genomes, resulting in genetically stable inheritance. In contrast, “transient transformation” refers to the transfer of a nucleic acid fragment into the nucleus, or DNA-containing organelle, of a host organism resulting in gene expression without integration or stable inheritance. Host organisms containing the transformed nucleic acid fragments are referred to as “transgenic” organisms.

[0160] As used herein, “transgenic” refers to a plant or a cell which comprises within its genome a heterologous polynucleotide. Preferably, the heterologous polynucleotide is stably integrated within the genome such that the polynucleotide is passed on to successive generations. The heterologous polynucleotide may be integrated into the genome alone or as part of an expression construct. Transgenic is used herein to include any cell, cell line, callus, tissue, plant part or plant, the genotype of which has been altered by the presence of heterologous nucleic acid including those transgenics-initially so altered as well as those created by sexual crosses or asexual propagation from the initial transgenic. The term “transgenic” as used herein does not encompass the alteration of the genome (chromosomal or extra-chromosomal) by conventional plant breeding methods or by naturally occurring events such as random cross-fertilization, non-recombinant viral infection, non-recombinant bacterial transformation, non-recombinant transposition, or spontaneous mutation.

[0161] The present invention concerns a recombinant DNA construct comprising a polynucleotide encoding an ODP1 polypeptide operably linked to a sucrose synthase 2 promoter wherein said construct increases oil content in the seeds of a cruciferous oilseed plant while maintaining normal germination and further wherein the amino acid sequence of said ODP1 polypeptide has at least 80% sequence identity to a sequence selected from the group consisting of SEQ ID NO:37, SEQ ID NO:39, and SEQ ID NO:41.

[0162] In another embodiment, the sequence identity can be at least 90% or 95%.

[0163] In another embodiment the ODP1 polypeptide comprises a sequence selected from the group consisting of SEQ ID NO:37, SEQ ID NO:39, and SEQ ID NO:41.

[0164] In another, embodiment, the sucrose synthase 2 promoter comprises: (a) the nucleotide sequence of SEQ ID NO:43, SEQ ID NO:72 or SEQ ID NO:73; or (b) a nucleotide sequence comprising a functional fragment of the nucleotide sequence of SEQ ID NO:43, SEQ ID NO:72 or SEQ ID NO:73.

[0165] ODP1 is a member of the APETALA2 (AP2) family of proteins that play a role in a variety of biological events including, but not limited to, oil content. The AP2/ERF, family of proteins is a plant-specific class of putative transcription factors that have been shown to regulate a wide-variety of developmental processes and are characterized by the presence of an AP2/ERF DNA binding domain. The AP2/ERF proteins have been subdivided into two distinct subfamilies based on whether they contain one (ERF subfamily) or two (AP2 subfamily) DNA binding domains.

[0166] Specifically, AP2 (APETALA2) and EREBPs (ethylene-responsive element binding proteins) are the prototypic members of a family of transcription factors unique to plants, whose distinguishing characteristic is that they contain the so-called AP2 DNA-binding domain. AP2/EREBP genes form a large multigene family, and they playa variety of roles throughout the plant life cycle. AP2/EREBP genes are key regulators of several developmental processes, including floral organ identity determination and leaf epidermal cell identity. In Arabidopsis thaliana, the homeotic gene APETALA2 (AP2) has been shown to control three salient processes during development: (1) the specification of flower organ identity throughout floral organogenesis (Jofuku et al., Plant Cell 6:1211-1225, 1994); (2) establishment of flower meristem identity (Irish and Sussex, Plant Cell 2:8:741-753, 1990); and (3) the temporal and spatial regulation of flower homeotic gene activity (Drews et al., Cell 65:6:991-1002, 1991). DNA sequence analysis suggests that AP2 encodes a theoretical polypeptide of 432 aa, with a distinct 68 aa repeated motif termed the AP2 domain. This domain has been shown to be essential for AP2 functions and contains within the 68 aa, an eighteen amino acid core region that is predicted to form an amphipathic α-helix (Jofuku et al., Plant Cell 6:1211-1225, 1994). Ap2-like domain-containing transcription factors have been also been identified in both Arabidopsis thaliana (Okamuro et al., Proc. Natl. Acad. Sci. USA 94:7076-7081, 1997) and in tobacco with the identification of the ethylene responsive element binding proteins (EREBPs) (Ohme-Takagi and Shinshi, Plant Cell 7:2:173-182, 1995). In Arabidopsis, these RAP2 (related to AP2) genes encode two distinct subfamilies of AP2 domain-containing proteins designated AP2-like and EREBP-like (Okamuro et al., Proc. Natl. Acad. Sci. USA 94:7076-7081, 1997). In vitro DNA binding has not been shown to date using the RAP2 proteins. Based upon the presence of two highly conserved motifs YRG and RAYD within the AP2 domain, it has been proposed that binding DNA binding occurs in a manner similar to that of AP2 proteins.

[0167] In another embodiment, the present invention concerns a transgenic cruciferous oilseed plant comprising in its genome the recombinant DNA construct of the invention. Also of interest is a transgenic seed obtained from a transgenic plant as described herein, wherein said seed comprises in its genome a recombinant DNA construct of the invention.

[0168] In still another aspect, the present invention concerns a method for producing a transgenic cruciferous oilseed plant comprising transforming a cruciferous oilseed plant cell with a recombinant construct of the invention and regenerating a transgenic plant from the transformed plant cell.

[0169] This invention concerns a transgenic seed obtained from a transgenic plant made by a method of the invention, wherein said seed comprises in its genome a recombinant DNA construct of the invention.

[0170] In another aspect, the present invention concerns a method for increasing oil content in seeds of a transgenic cruciferous oilseed plant while maintaining normal germination, said method comprising:
[0171] (a) transforming a cruciferous oilseed plant cell with a recombinant DNA construct comprising a polynucleotide encoding an ODP1 polypeptide, wherein the amino acid sequence of said ODP1 polypeptide has at least 80%, at least 90% or at least 95% sequence identity with a sequence selected from the group consisting of SEQ ID NO:37, SEQ ID NO:39, and SEQ ID NO:41, said sequence being operably linked to a seed specific promoter;
[0172] (b) regenerating a transgenic cruciferous oilseed plant from the transformed cell of step (a), wherein said plant comprises the recombinant DNA construct;
[0173] (c) obtaining a transgenic progeny plant derived from the transgenic cruciferous oilseed plant of step (b), wherein the transgenic progeny plant comprises in its genome the recombinant DNA construct;
[0174] (d) assaying the transgenic progeny plant obtained from step (c) for oil level and germination; and
[0175] (e) selecting those transgenic progeny plants having seeds with an increased level of oil and normal germination when compared to seeds obtained from a control cruciferous oilseed plant, wherein said control plant does not comprise the recombinant DNA construct.

[0176] Preferably, the ODP1 polypeptide is a maize ODP1 polypeptide and, more preferably, the amino acid sequence of the ODP1 polypeptide comprises the sequence of SEQ ID NO:37.

[0177] With respect to the seed specific promoter, it can be a sucrose synthase 2 promoter and preferably, the nucleotide sequence of sucrose synthase 2 promoter comprises: (a) the nucleotide sequence of SEQ ID NO:43, SEQ ID NO:72 or SEQ ID NO:73; or (b) a nucleotide sequence comprising a functional fragment of the nucleotide sequence of SEQ ID NO:43, SEQ ID NO:72 or SEQ ID NO:73.

[0178] The transgenic cruciferous oil seeds described herein of the invention can be processed to yield oil and/or seed by-products.

[0179] In another embodiment, the present invention concerns a recombinant DNA construct comprising a polynucleotide encoding a heterologous polypeptide operably linked to a sucrose synthase 2 promoter, wherein the sucrose synthase 2 promoter comprises: (a) the nucleotide sequence of SEQ ID NO:43, SEQ ID NO:72 or SEQ ID NO:73; (b) a nucleotide sequence comprising a functional fragment of the nucleotide sequence of SEQ ID NO:43, SEQ ID NO:72 or SEQ ID NO:73; or (c) a nucleotide sequence with at least 80%, at least 90% or at least 95% sequence identity to the nucleotide sequence of SEQ ID NO:43, SEQ ID NO:72 or SEQ ID NO:73; wherein the nucleotide sequence of (a), (b) or (c) has seed-specific promoter activity in a plant. The invention also concerns a transgenic plant, plant cell and seed comprising the recombinant DNA construct. The transgenic plant may be a transgenic cruciferous plant.

[0180] The nucleotide and deduced amino acid sequence of the canola SUS2 homolog transcript model are set forth as SEQ ID NO:44 and SEQ ID NO:45, respectively.

[0181] NCBI GI NO. 150912532 is the nucleotide sequence of the 5′-end of a Brassica oleracea cDNA.

[0182] SEQ ID NO:72 is the nucleotide sequence of the sucrose synthase 2-1 (BnSUS2-1) promoter from Brassica napus that is present in BN SUS2 prom1/PCR blunt. Comparison of SEQ ID NO:72 with SEQ ID NO:44 and NCBI GI NO. 150912532 indicate that nucleotide 427 is at or near the beginning of the 5′-Untranslated region of the canola SUS2 gene. Consequently, a fragment comprising nucleotides 1-426 of SEQ ID NO:72 would be expected to have seed-specific promoter activity in a plant.

[0183] SEQ ID NO:73 is the nucleotide sequence of the sucrose synthase 2-2 (BnSUS2-2) promoter from Brassica napus that is present in BN SUS2 prom2/PCR blunt. Comparison of SEQ ID NO:73 with SEQ ID NO:44 and NCBI GI NO. 150912532 indicate that nucleotide 1766 is at or near the beginning of the 5′-Untranslated region of the canola SUS2 gene. Consequently, a fragment comprising nucleotides 1-1765 of SEQ ID NO:73 would be expected to have seed-specific promoter activity in a plant.

[0184] The cruciferous oilseed plant (or seed) of any of the compositions or methods of the present invention can be canola or Arabidopsis or other plant species including but not limited to the following: Barbarea vulgaris, Brassica campestris, Brassica carinata, Brassica elongate, Brassica fruticulosa, Brassica hirta, Brassica juncea, Brassica napus, Brassica narinosa, Brassica nigra, Brassica oleracea, Brassica perviridis, Brassica rapa, Brassica rupestris, Brassica septiceps, Brassica tournefortii, Brassica verna, Camelina sativa, Crambe abyssinica, Lepidium campestre, Raphanus sativus, Sinapis alba.

[0185] Methods of isolating seed oils are well known in the art: (Young et al., Processing of Fats and Oils, In The Lipid Handbook, Gunstone et al., eds., Chapter 5 pp 253-257; Chapman & Hall: London (1994)). Seed by-products include but are not limited to the following: meal, lecithin, gums, free fatty acids, pigments, soap, stearine, tocopherols, sterols and volatiles.

[0186] The production of edible vegetable oils including canola oil involves two overall processes, mechanical pressing and extraction, and further processing to remove impurities. The techniques used are similar for most vegetable oils produced from the seeds of plants. The crushing and extraction processes utilized by the canola industry today produce very little change to the fatty acid profile of the oil and the nutritional qualities of the meal.

[0187] For example, canola seeds are crushed into two component parts, oil and meal, which are then further manufactured into a wide variety of products. Further manufacturing, called refining, improves the color, flavor and shelf life of canola oil.

[0188] Canola oil is extracted in several stages. The first stage in processing canola is to roll or flake the seed. This ruptures cells and makes the oil easier to extract. Next the flaked or rolled seeds are cooked and subjected to a mild pressing process which removes some of the oil and compresses the seeds into large chunks called “cake fragments.” The cake fragments undergo further processing to remove most of the remaining oil. The oil extracted during each step is combined. The oil is then subjected to processing according to the end product requirements. Different treatments are used to process salad oils, margarines, and shortenings.

[0189] Specifically, canola seed is cleaned by a number of different methods including air aspiration, indent cylinder cleaning, sieve screening, or a combination of these. Cleaning ensures that the seed is free of extraneous plant and other foreign material which is referred to in the industry as “dockage”. Seed generally contains less than 2.5% dockage following the cleaning process. Seed that has been cleaned is ready for subsequent crushing into canola oil and meal.

[0190] Seed which will be processed for oil and meal is preconditioned using mild heat treatment, and moisture is then adjusted to improve subsequent oil extraction. Following preconditioning, canola seed is next crushed and flaked and then heated slightly. These processes help to maximize oil recovery. The canola flakes are then “prepressed” in screw presses or expellers to reduce the oil content from about 42% in the seed (on an 8% moisture basis) to between 16-20%. Screw pressing also compresses the flakes into more dense cakes (called “press cake”) which facilitates oil extraction.

[0191] Press cake which results from seed processing is next subjected to one of two types of oil extraction to remove much of the remaining oil. Oil may be extracted using either hexane (“solvent”) extraction or by “cold-pressing” (also referred to as “expeller pressing”). The end-market into which the oil is sold generally dictates which form of extraction will be used. Hexane is the extraction medium used for the bulk of canola oil which is sold into the commodity grocery chain market as well as to the food industry. Cold-pressed canola oil represents a much smaller volume sold to consumers and is generally marketed in specialty food stores. Both extraction processes result in an oil essentially bland in taste, light yellow in color, and with excellent nutritional and stability properties.

[0192] Hexane extraction reduces the oil content of the press cake to very low levels. Oil recovery from canola seed is approximately 96% when this form of extraction is used. This is accomplished by maximizing contact of the hexane with the press cake through a series of soakings or washings. Residual hexane in the extracted press cake and oil is easily removed by evaporation at low temperature. Solvent residues in oils and meals, when produced in accordance with good manufacturing practice, can be said to be truly insignificant.

[0193] The oil which is produced during the extraction process is referred to as “crude oil” because it contains various compounds which must be removed to ensure a product with good stability and shelf-life. These impurities include phospholipids, mucilaginous gums, free fatty acids, color pigments and fine meal particles. Different methods are used to remove these by-products including water precipitation or organic acids in combination with water. Once removed, these, by-products are added to the canola meal fraction in order to increase its feeding value (energy) and make it an even more nutritious product.

[0194] Following water precipitation and/or organic acid processing, the oil will still contain color compounds which, if not removed would make it unattractive to the consumer and also reduce its stability. These compounds are extracted through a process called bleaching. In contrast to what may be implied by the term, bleaching does not involve the use of harsh chemicals. Instead, during the bleaching process, the oil is moved through a natural, diatomaceous clay to remove color compounds and other by-products.

[0195] Deodorization is the final step in the refining of all vegetable oils, including canola. Deodorization involves the use of steam distillation with the objective being the removal of any residual compounds which, if retained, could impart an adverse odor and taste to the oil. The oil produced is referred to as “refined oil”.

[0196] In still another embodiment, this invention concerns a transgenic progeny plant obtained from the plant of claim 7 or 12, wherein said transgenic progeny plant comprises the recombinant DNA construct.

[0197] There are a variety of methods for the regeneration of plants from plant tissue. The particular method of regeneration will depend on the starting plant tissue and the particular plant species to be regenerated. The regeneration, development and cultivation of plants from single plant protoplast transformants or from various transformed explants is well known in the art (Weissbach and Weissbach, In: Methods for Plant Molecular Biology, (Eds.), Academic: San Diego, Calif. (1988)). This regeneration and growth process typically includes the steps of selection of transformed cells and culturing those individualized cells through the usual stages of embryonic development through the rooted plantlet stage. Transgenic embryos and seeds are similarly regenerated. The resulting transgenic rooted shoots are thereafter planted in an appropriate plant growth medium such as soil. Preferably, the regenerated plants are self-pollinated to provide homozygous transgenic plants. Otherwise, pollen obtained from the regenerated plants is crossed to seed-grown plants of agronomically important lines. Conversely, pollen from plants of these important lines is used to pollinate regenerated plants. A transgenic plant of the present invention containing a desired polypeptide is cultivated using methods well known to one skilled in the art.

[0198] Normal germination of transgenic plant seed is defined as germination frequency that is very similar to the germination frequency of seed of the untransformed variety under produced under identical conditions.

[0199] In addition to the above discussed procedures, practitioners are familiar with the standard resource materials which describe specific conditions and procedures for: the construction, manipulation and isolation of macromolecules (e.g., DNA molecules, plasmids, etc.); the generation of recombinant DNA fragments and recombinant expression constructs; and, the screening and isolating of clones. See, for example: Sambrook et al., Molecular Cloning: A Laboratory Manual, Cold Spring Harbor: NY (1989); Maliga et al., Methods in Plant Molecular Biology, Cold Spring Harbor: NY (1995); Birren et al., Genome Analysis: Detecting Genes, Vol. 1, Cold Spring Harbor: NY (1998); Birren et al., Genome Analysis: Analyzing DNA, Vol. 2, Cold Spring Harbor: NY (1998); Plant Molecular Biology: A Laboratory Manual, eds. Clark, Springer: NY (1997).

[0200] Examples of cruciferous oilseed plants that can be used to practice the invention include, but are not limited to, Brassica species, and Arabidopsis thaliana.

[0201] Assays for gene expression based on the transient expression of cloned nucleic acid constructs have been developed by introducing the nucleic acid molecules into plant cells by polyethylene glycol treatment, electroporation, or particle bombardment (Marcotte et al., Nature 335:454-457 (1988); Marcotte et al., Plant Cell 1:523-532 (1989); McCarty et al., Cell 66:895-905 (1991); Hattori et al., Genes Dev. 6:609-618 (1992); Goff et al., EMBO J. 9:2517-2522 (1990)).

[0202] Transient expression systems may be used to functionally dissect gene constructs (see generally, Maliga et al., Methods in Plant Molecular Biology, Cold Spring Harbor Press (1995)). It is understood that any of the nucleic acid molecules of the present invention can be introduced into a plant cell in a permanent or transient manner in combination with other genetic elements such as vectors, promoters, enhancers etc.

[0203] In addition to the above discussed procedures, practitioners are familiar with the standard resource materials which describe specific conditions and procedures for the construction, manipulation and isolation of macromolecules (e.g., DNA molecules, plasmids, etc.), generation of recombinant organisms and the screening and isolating of clones, (see for example, Sambrook et al., Molecular Cloning: A Laboratory Manual, Cold Spring Harbor Press (1989); Maliga et al., Methods in Plant Molecular Biology, Cold Spring Harbor Press (1995); Birren et al., Genome Analysis: Detecting Genes, 1, Cold Spring Harbor, N.Y. (1998); Birren et al., Genome Analysis: Analyzing DNA, 2, Cold Spring Harbor, N.Y. (1998); Plant Molecular Biology: A Laboratory Manual, eds. Clark, Springer, New York (1997)).

### EXAMPLES

[0204] The present invention is further defined in the following Examples, in which parts and percentages are by weight and degrees are Celsius, unless otherwise stated. It should be understood that these Examples, while indicating preferred embodiments of the invention, are given by way of illustration only. From the above discussion and these Examples, one skilled in the art can ascertain the essential characteristics of this invention, and without departing from the spirit and scope thereof, can make various changes and modifications of the invention to adapt it to various usages and conditions. Thus, various modifications of the invention in addition to those shown and described herein will be apparent to those skilled in the art from the foregoing description. Such modifications are also intended to fall within the scope of the appended claims.

[0205] The meaning of abbreviations is as follows: “sec” means second(s), “min” means minute(s), “h” means hour(s), “d” means day(s), “μL” means microliter(s), “mL” means milliliter(s), “L” means liter(s), “μM” means micromolar, “mM” means millimolar, “M” means molar, “mmol” means millimole(s), “μmole” mean micromole(s), “g” means gram(s), “μg” means microgram(s), “ng” means nanogram(s), “U” means unit(s), “bp” means base pair(s) and “kB” means kilobase(s).

### Example 1

### Construction of Vector pZBL120xKS336 for Expression of a Zea mays ODP1 Under Control of a Beta-Conqlycinin Promoter

[0206] Plasmid pKS332 was constructed via a number of different intermediate vectors. The AscI cassette containing Kti3 Promoter::NotI::Kti3 Terminator from pKS121 (PCT Application No. WO 02/00904) was blunt-end cloned into the NotI (filled-in) site on pBLUESCRIPT® II SK+ (Stratagene) to give pKS121/BS (Seq ID N0:1). The NcoI/NotI fragment from expression vector pDsRed-Express (Clontech) was blunt-end cloned into the NotI (filled-in) site of pKS121/BS to give pDsRedxKS121/BS (SEQ ID NO:2). The BamHI cassette containing Kti3 Promoter::DsRed::Kti3 Terminator in pDS-REDxKS121/BS (SEQ ID NO:1) was ligated into the BamHI site of pKS123 (PCT Application No. WO 02/08269) to give pKS332 (SEQ ID NO:3). A DNA fragment encoding the ODP1 polypeptide from maize, Zm-ODP1, described in U.S. Pat. No. 7,157,621, was synthesized by PCR with primers to introduce NotI sites at both ends. Applicants cDNA clone cde1c.pk003.o22 (SEQ ID NO:319 in U.S. Pat. No. 7,157,621) was used as template in a PCR reaction using primers MWG345 (SEQ ID NO:4) and MWG346 (SEQ ID NO:5). The resulting PCR product was digested with NotI restriction enzyme and ligated into the NotI site of pKS332 to give pKS336 (SEQ ID NO:6). Plasmid pKS336 contains the ZM-ODP1 protein-coding region of cDNA clone cde1c.pk003.o22 fused at its 5′ terminus with the promoter of the soybean gene for the α′-subunit of β-conglycinin (Beachy et al. (1985) EMBO J. 4:3047-3053) and at its 3′ end with the terminator sequence from the phaseolin gene of common bean, Phaseolus vulgaris (Doyle et al. (1986) J. Biol. Chem. 261:9228-9238). The β-conglycinin promoter directs strong seed-specific expression of transgenes in transformed plants.

[0207] A 5.9 kb DNA fragment containing the ZM-ODP1 and DsRed expression cassettes was excised from KS336 using the restriction enzyme AscI and the ends were filled-in with T4 DNA polymerase (Promega, Madison, USA). This fragment was ligated to linearized DNA of the Agrobacterium tumefaciens binary vector pZBL120, which had been linearized with EcoRI and BamHI and the ends filled-in, to give pZBL120xKS336. The T-DNA of the plant transformation vector pZBL120xKS336 is set forth as SEQ ID NO:7.

[0208] It is noted that the binary vector pZBL120 is identical to the pZBL1 binary vector (American Type Culture Collection Accession No. 209128) described in U.S. Pat. No. 5,968,793, except the NOS promoter was replaced with a 963 bp 35S promoter (NCBI Accession No. V00141; also known as NCBI General Indentifier No. 58821) from nucleotide 6494 to 7456 in the NOS Promoter::nptII::OCS Terminator cassette. The new 35S Promoter::nptII::OCS Terminator cassette serves as a kanamycin (Kan) resistance plant selection marker in pZBL120.

### Example 2

### Generation and Analysis of Oil Content of Transgenic Arabidopsis Lines Containing a Beta-Conglycinin Promoter::ZM-ODP1::Phaseolin Terminator Expression Cassette

[0209] Plasmid DNA of pZBL120xKS336, containing the beta-conglycinin promoter::ZM-ODP1::phaseolin terminator expression cassette, was introduced into Agrobacterium tumefaciens NTL4 (Luo et al, Molecular Plant-Microbe Interactions (2001) 14(1):98-103) by electroporation. Briefly, 1 μg plasmid DNA was mixed with 100 μL of electro-competent cells on ice. The cell suspension was transferred to a 100 μL electroporation cuvette (1 mm gap width) and electroporated using a BIORAD electroporator set to 1 kV, 400Ω and 25 μF. Cells were transferred to 1 mL LB medium and incubated for 2 h at 30° C. Cells were plated onto LB medium containing 50 μg/mL kanamycin. Plates were incubated at 30° C. for 60 h. Recombinant Agrobacterium cultures (500 mL LB, 50 μg/mL kanamycin) were inoculated from single colonies of transformed agrobacterium cells and grown at 30° C. for 60 h. Cells were harvested by centrifugation (5000×g, 10 min) and resuspended in 1 L of 5% (W/V) sucrose containing 0.05% (V/V) Silwet. Arabidopsis plants were grown in soil at a density of 30 plants per 100 cm² pot in METRO-MIX® 360 soil mixture for 4 weeks (22° C., 16 h light/8 h dark, 100 μE m⁻²s⁻¹). Plants were repeatedly dipped into the Agrobacterium suspension harboring the binary vector pZBL120xKS336 and kept in a dark, high humidity environment for 24 h. Plants were grown for three to four weeks under standard plant growth conditions described above and plant material was harvested and dried for one week at ambient temperatures in paper bags. Seeds were harvested using a 0.425 mm mesh brass sieve.

[0210] Cleaned Arabidopsis seeds (2 grams, corresponding to about 100,000 seeds) were sterilized by washes in 45 mL of 80% ethanol, 0.01% TRITON® X-100, followed by 45 mL of 30% (V/V) household bleach in water, 0.01% TRITON® X-100 and finally by repeated rinsing in sterile water. Aliquots of 20,000 seeds were transferred to square plates (20×20 cm) containing 150 mL of sterile plant growth medium comprised of 0.5×MS salts, 0.53% (W/V) sorbitol, 0.05 MES/KOH (pH 5.8), 200 μg/mL TIMENTIN®, and 50 μg/mL kanamycin solidified with 10 g/L agar. Homogeneous dispersion of the seed on the medium was facilitated by mixing the aqueous seed suspension with an equal volume of melted plant growth medium. Plates were incubated under standard growth conditions for ten days. Kanamycin-resistant seedlings were transferred to plant growth medium without selective agent and grown for one week before transfer to soil. Plants were grown to maturity and T2 seeds were harvested and plated on selective media containing kanamycin. Approximately 100 events were generated in this manner. Wild-type (WT) control plants were grown in the same flat containing pZBL120xKS336 T1 plants. T2 seed were harvested and oil content was measured by NMR as follows.

[0211] NMR Based Analysis of Seed Oil Content:

[0212] Seed oil content was determined using a Maran Ultra NMR analyzer (Resonance Instruments Ltd, Whitney, Oxfordshire, UK). Samples (e.g., batches of Arabidopsis seed ranging in weight between 5 and 200 mg) were placed into pre-weighed 2 mL polypropylene tubes (Corning Inc, Corning N.Y., USA; Part no. 430917) previously labeled with unique bar code identifiers. Samples were then placed into 96 place carriers and processed through the following series of steps by an ADEPT COBRA 600™ SCARA robotic system:
[0213] 1. pick up tube (the robotic arm was fitted with a vacuum pickup devise);
[0214] 2. read bar code;
[0215] 3. expose tube to antistatic device (ensured that Arabidopsis seed were not adhering to the tube walls);
[0216] 4. weigh tube (containing the sample), to 0.0001 g precision;
[0217] 5. take NMR reading; measured as the intensity of the proton spin echo 1 msec after a 22.95 MHz signal had been applied to the sample (data was collected for 32 NMR scans per sample);
[0218] 6. return tube to rack; and
[0219] 7. repeat process with next tube.

[0220] Bar codes, tubes weights and NMR readings were recorded by a computer connected to the system. Sample weight was determined by subtracting the polypropylene tube weight from the weight of the tube containing the sample.

[0221] Seed oil content (on a % seed weight basis) of Arabidopsis seed was calculated as follows:

mg oil=(NMR signal−2.1112)/37.514;

% oil=[(mg oil)/1000]/[g of seed sample weight]×100.

[0222] Prior to establishing this formula, Arabidopsis seed oil was extracted as follows. Approximately 5 g of mature Arabidopsis seed (cv Columbia) were ground to a fine powder using a mortar and pestle. The powder was placed into a 33×94 mm paper thimble (Ahlstrom # 7100-3394; Ahlstrom, Mount Holly Springs, Pa., USA) and the oil extracted during approximately 40 extraction cycles with petroleum ether (BP 39.9-51.7° C.) in a Soxhlet apparatus. The extract was allowed to cool and the crude oil was recovered by removing the solvent under vacuum in a rotary evaporator. Calibration parameters were determined by precisely weighing 11 standard samples of partially purified Arabidopsis oil (samples contained 3.6, 6.3, 7.9, 9.6, 12.8, 16.3, 20.3, 28.2, 32.1, 39.9 and 60 mg of partially purified Arabidopsis oil) weighed to a precision of 0.0001 g) into 2 mL polypropylene tubes (Corning Inc, Corning N.Y., USA; Part no. 430917) and subjecting them to NMR analysis. A calibration curve of oil content (% seed weight basis) to NMR value was established.

[0223] Seed oil content of most transgenic lines was increased when compared to oil content of seed collected from wild-type control plants grown in the same flat. The phenotype of two representative transgenic lines, C00536 and C00576, are described below in detail. Kanamycin-resistant T2 seedlings were transferred from selective growth media to soil. For C00536, thirteen T2 plants were grown with four wild-type (WT) control plants. For C00576 ten T2 plants were grown with seven WT control plants. Plants were grown to maturity, T3 seed were harvested from individual plants and subjected to oil quantitation by NMR.

[0224] Data are summarized in Table 1. Presence of the pZBL120xKS336 transgene is associated with an increase in oil content in transgenic T3 seed when compared Arabidopsis plants of identical genetic background that lack the transgene.

TABLE 1
Oil Content of T3 Seed of pZBL120xKS336 Transgenics

| Exp | Event ID | Plant # | % Oil |
|---|---|---|---|
| 1 | C00536 | 1 | 45.7 |
| 1 | C00536 | 2 | 45.1 |
| 1 | C00536 | 3 | 45.0 |
| 1 | C00536 | 4 | 44.6 |
| 1 | C00536 | 5 | 44.0 |
| 1 | C00536 | 6 | 43.7 |
| 1 | C00536 | 7 | 43.5 |
| 1 | C00536 | 8 | 42.8 |
| 1 | C00536 | 9 | 42.7 |
| 1 | C00536 | 10 | 42.0 |
| 1 | C00536 | 11 | 42.0 |
| 1 | C00536 | 12 | 41.9 |
| 1 | C00536 | 13 | 39.9 |
| 1 | C00536 | AVG | 43.3 |
| 1 | WT | 1 | 39.5 |
| 1 | WT | 2 | 37.5 |
| 1 | WT | 3 | 37.0 |
| 1 | WT | 4 | 34.7 |
| 1 | WT | AVG | 37.2 |
| 2 | C00576 | 1 | 48.0 |
| 2 | C00576 | 2 | 47.9 |
| 2 | C00576 | 3 | 45.9 |
| 2 | C00576 | 4 | 45.3 |
| 2 | C00576 | 5 | 44.5 |
| 2 | C00576 | 6 | 43.7 |
| 2 | C00576 | 7 | 43.6 |
| 2 | C00576 | 8 | 42.1 |
| 2 | C00576 | 9 | 41.9 |
| 2 | C00576 | 10 | 41.0 |
| 2 | C00576 | AVG | 44.4 |
| 2 | WT | 1 | 42.2 |
| 2 | WT | 2 | 40.9 |
| 2 | WT | 3 | 40.4 |
| 2 | WT | 4 | 39.3 |
| 2 | WT | 5 | 38.7 |
| 2 | WT | 6 | 38.0 |
| 2 | WT | 7 | 37.8 |
| 2 | WT | AVG | 39.6 |

[0225] Transgenic T3 seed selections that no longer segregated for the DsRed marker gene were identified by visual inspection using a suitable light source. For both events non-segregating transgenic seed were planted in soil alongside untransformed WT plants.

[0226] T4 seed were harvested from individual T3 plants and WT controls. Oil content was measured by NMR (Table 2). Presence of the pZBL120xKS336 transgene is associated with an increase in oil content in transgenic T4 seed when compared to Arabidopsis plants of identical genetic background that lack the transgene.

TABLE 2
Oil Content of T4 Seed of pZBL120xKS336 Transgenics

| Exp | Event ID | Plant # | % Oil |
|---|---|---|---|
| 1 | C00536 | 1 | 46.5 |
| 1 | C00536 | 2 | 46.5 |
| 1 | C00536 | 3 | 46.4 |
| 1 | C00536 | 4 | 46.3 |
| 1 | C00536 | 5 | 46.3 |
| 1 | C00536 | 6 | 46.2 |
| 1 | C00536 | 7 | 46.2 |
| 1 | C00536 | 8 | 46.2 |
| 1 | C00536 | 9 | 46.2 |
| 1 | C00536 | 10 | 46.1 |
| 1 | C00536 | 11 | 46.0 |
| 1 | C00536 | 12 | 45.8 |
| 1 | C00536 | 13 | 45.2 |
| 1 | C00536 | 14 | 45.1 |
| 1 | C00536 | 15 | 45.1 |
| 1 | C00536 | 16 | 44.5 |
| 1 | C00536 | 17 | 43.5 |
| 1 | C00536 | 18 | 43.4 |
| 1 | C00536 | AVG | 45.6 |
| 1 | WT | 1 | 44.8 |
| 1 | WT | 2 | 44.6 |
| 1 | WT | 3 | 42.3 |
| 1 | WT | 4 | 42.1 |
| 1 | WT | 5 | 42.0 |
| 1 | WT | AVG | 43.2 |
| 2 | C00536 | 1 | 45.7 |
| 2 | C00536 | 2 | 45.6 |
| 2 | C00536 | 3 | 45.6 |
| 2 | C00536 | 4 | 45.4 |
| 2 | C00536 | 5 | 45.4 |
| 2 | C00536 | 6 | 45.4 |
| 2 | C00536 | 7 | 45.4 |
| 2 | C00536 | 8 | 45.4 |
| 2 | C00536 | 9 | 45.4 |
| 2 | C00536 | 10 | 45.1 |
| 2 | C00536 | 11 | 45.1 |
| 2 | C00536 | 12 | 45.0 |
| 2 | C00536 | 13 | 44.8 |
| 2 | C00536 | 14 | 44.7 |
| 2 | C00536 | 15 | 44.6 |
| 2 | C00536 | 16 | 44.5 |
| 2 | C00536 | 17 | 43.5 |
| 2 | C00536 | 18 | 43.1 |
| 2 | C00536 | AVG | 45.0 |
| 2 | WT | 1 | 43.8 |
| 2 | WT | 2 | 43.3 |
| 2 | WT | 3 | 42.3 |
| 2 | WT | 4 | 41.8 |
| 2 | WT | 5 | 41.5 |
| 2 | WT | 6 | 40.2 |
| 2 | WT | AVG | 42.1 |
| 3 | C00576 | 1 | 45.3 |
| 3 | C00576 | 2 | 44.8 |
| 3 | C00576 | 3 | 44.7 |
| 3 | C00576 | 4 | 44.7 |
| 3 | C00576 | 5 | 44.4 |
| 3 | C00576 | 6 | 44.2 |
| 3 | C00576 | 7 | 44.2 |
| 3 | C00576 | 8 | 44.2 |
| 3 | C00576 | 9 | 44.2 |
| 3 | C00576 | 10 | 44.0 |
| 3 | C00576 | 11 | 43.8 |
| 3 | C00576 | 12 | 43.3 |
| 3 | C00576 | 13 | 43.1 |
| 3 | C00576 | 14 | 43.0 |
| 3 | C00576 | 15 | 41.8 |
| 3 | C00576 | 16 | 41.1 |
| 3 | C00576 | AVG | 43.8 |
| 3 | WT | 1 | 43.8 |
| 3 | WT | 2 | 42.9 |
| 3 | WT | 3 | 42.4 |
| 3 | WT | 4 | 41.9 |
| 3 | WT | 5 | 41.6 |
| 3 | WT | 6 | 40.3 |
| 3 | WT | 7 | 37.5 |
| 3 | WT | 8 | 41.1 |
| 3 | WT | AVG | 41.4 |
| 4 | C00576 | 1 | 46.6 |
| 4 | C00576 | 2 | 46.4 |
| 4 | C00576 | 3 | 46.3 |
| 4 | C00576 | 4 | 46.2 |
| 4 | C00576 | 5 | 46.2 |
| 4 | C00576 | 6 | 46.2 |
| 4 | C00576 | 7 | 46.2 |
| 4 | C00576 | 8 | 45.7 |
| 4 | C00576 | 9 | 45.7 |
| 4 | C00576 | 10 | 45.6 |
| 4 | C00576 | 11 | 45.6 |
| 4 | C00576 | 12 | 45.4 |
| 4 | C00576 | 13 | 45.4 |
| 4 | C00576 | 14 | 45.1 |
| 4 | C00576 | 15 | 45.0 |
| 4 | C00576 | 16 | 44.3 |
| 4 | C00576 | 17 | 44.2 |
| 4 | C00576 | AVG | 45.7 |
| 4 | WT | 1 | 44.7 |
| 4 | WT | 2 | 44.6 |
| 4 | WT | 3 | 44.4 |
| 4 | WT | 4 | 43.7 |
| 4 | WT | 5 | 43.5 |
| 4 | WT | 6 | 42.2 |
| 4 | WT | AVG | 43.9 |

[0227] A total of five flats were planted using WT seed and homozygous T4 seed of C00536 and C00576. Twenty-four transgenic T4 plants were grown alongside twelve WT plants. Plants were grown to maturity. From each flat WT and transgenic seed were bulk-harvested. Oil content of bulk seed samples was measured by NMR (Table 3). Presence of the pZBL120xKS336 transgene is associated with an increase in oil content in transgenic T5 seed when compared to Arabidopsis plants of identical genetic background that lack the transgene.

[0228] Seed oil content in a given plant is a highly variable trait that responds strongly to plant growth conditions (Li Y, Beisson F, Pollard M, Ohlrogge J (2006) Oil content of Arabidopsis seeds: The influence of seed anatomy, light and plant-to-plant variation, Phytochemistry 67:904-915). It is therefore important that an increase in oil content associated with a particular strategy is observed in multiple environments, over several generations and under conditions that allow for maximal oil accumulation by isogenic control lines. The increase in oil content associated with presence of the pZBL120xKS336 transgene was consistently observed over three generations and in different growth chambers. The average oil increase associated with two different pZBL120xKS336 transgenic events was at least 2% points and as high as 3.6% points (i.e., an oil increase of as high as 8.5% compared to untransformed WT seed). This oil increase was observed under growth conditions in which untransformed Arabidopsis seed produced the expected levels of oil, indicating that oil seed storage lipid accumulation was operating at maximum levels.

TABLE 3
Oil Content of T5 Seed of pZBL120xKS336 Transgenics

| | | | Δ Oil (% | |
|---|---|---|---|---|
| Flat ID | Event ID | Oil (%) | Points) | Δ Oil (%) |
| A | C00576 | 45.1 | 1.7 | 3.9 |
| | WT | 43.5 | | |
| B | C00576 | 46.4 | 1.9 | 4.2 |
| | WT | 44.5 | | |
| C | C00576 | 44.8 | 2.3 | 5.5 |
| | WT | 42.5 | | |
| D | C00576 | 45.5 | 2.0 | 4.7 |
| | WT | 43.4 | | |
| E | C00576 | 44.6 | 2.0 | 4.7 |
| | WT | 42.6 | | |
| AVG | C00576 | | 2.0 | 4.6 |
| A | C00536 | 45.9 | 3.3 | 7.8 |
| | WT | 42.6 | | |
| B | C00536 | 45.8 | 3.4 | 8.1 |
| | WT | 42.4 | | |
| C | C00536 | 46.7 | 4.7 | 11.2 |
| | WT | 42.0 | | |
| D | C00536 | 44.7 | 3.9 | 9.6 |
| | WT | 40.8 | | |
| E | C00536 | 46.2 | 2.6 | 6.0 |
| | WT | 43.5 | | |
| AVG | C00536 | | 3.6 | 8.5 |

### Example 3

### Construction of Vector pZBL120xKS333 for Expression of a Momordica charantia ODP1 Under Control of a Beta-Conglycinin Promoter

[0229] An ODP1 protein-coding region from balsam pear (Momordica charantia) described in detail in U.S. Pat. No. 7,157,621 was synthesized by PCR with primers to introduce NotI sites at both ends of the gene. Applicants cDNA clone fds1n.pk015.115 was used a template in the PCR reaction using primers MWG339 (SEQ ID NO:8) and MWG340 (SEQ ID NO:9). The resulting PCR product was digested with NotI restriction enzyme and ligated into the NotI site of pKS332 to give pKS333 (SEQ ID NO:10).

[0230] A 6.1 kb DNA fragment containing the MC-ODP1 and DsRed expression cassettes was excised from KS333 using the restriction enzyme AscI, the ends were filled-in with T4 DNA polymerase (Promega, Madison, USA) and the fragment was blunt-end ligated to DNA of the Agrobacterium tumefaciens binary vector pZBL120, which had been linearized with EcoRI and BamHI and the ends filled-in. The resulting plant transformation vector was designated pZBL120xKS333, and the T-DNA of this vector is set forth as SEQ ID NO:11.

### Example 4

### Construction of Vector pZBL120xKS334 for Expression of a Glycine max ODP1 Under Control of a Beta-Conglycinin Promoter

[0231] An ODP1 protein-coding region from soybean described in detail in U.S. Pat. No. 7,157,621 was synthesized by PCR with primers to introduce NotI sites at both ends of the gene. Applicants cDNA clone se3.pk0003.f5 was used as template in the PCR reaction using primers MWG341 (SEQ ID NO:12) and MWG342 (SEQ ID NO:13). The resulting PCR product was digested with NotI restriction enzyme and ligated into the NotI site of pKS332 to give pKS334 (SEQ ID NO:14).

[0232] A 6.1 kb DNA fragment containing the GM-ODP1 and DsRed expression cassettes was excised from KS334 using the restriction enzyme AscI, the ends were filled-in with T4 DNA polymerase (Promega, Madison, USA) and the fragment was blunt-end ligated to DNA of the Agrobacterium tumefaciens binary vector pZBL120, which had been linearized with EcoRI and BamHI and the ends filled-in. The resulting plant transformation vector was designated pZBL120xKS334, and the T-DNA of this vector is set forth as SEQ ID NO:15.

### Example 5

### Generation of Arabidopsis Lines Transformed with Momordica charantia ODP1 or Glycine max ODP1 and Analysis of Seed Oil Content

[0233] Binary vector constructs pZBL120xKS333 (Momordica charantia ODP1) and pZBL120xKS334 (Glycine max ODP1) were used for Arabidopsis transformation using the floral dip method as described above. Transgenic lines were selected on plant growth media containing kanamycin. 75 and 190 lines were generated with pZBL120xKS333 and pZBL120xKS334, respectively. T1 plants of all lines were grown with 13 untransformed WT plants in the same growth Chamber. Plants were grown to maturity. Seed were harvested form individual plants and oil content was measured by NMR (TABLE 4)

TABLE 4
Oil Content of T2 seed of pZBL120xKS333 and
pZBL120xKS334 Transgenics

| Arabidopsis Line | # of Plants | % Oil Range | Average % Oil |
|---|---|---|---|
| pZBL120xKS333 | 77 | 25.5-46.6 | 41.7 |
| pZBL120xKS334 | 180 | 16.0-48.1 | 40.7 |
| WT | 13 | 31.9-43.2 | 39.1 |

[0234] T2 seed of two representative transgenic lines, 4445 (pZBL120xKS333) and 4485 (pZBL120xKS334), had an oil content of 45.1% and 45.2% respectively. T2 seed of these two lines were germinated on selective media, seedlings were transferred to soil, T2 plants were grown to maturity and T3 seed were harvested. After one more round of germination on selective media and seed production for each event five flats were planted with 24 kanamycin-resistant 4445 or 4485 seedlings and 12 WT seedlings. Plants were grown to maturity. From each flat WT and transgenic seed were bulk-harvested. Oil content of bulk seed samples was measured by NMR (Table 5). Presence of the pZBL120xKS333 or pZBL120xKS334 transgenes is associated with an increase in oil content in transgenic T5 seed when compared to Arabidopsis plants of identical genetic background that lack the transgene.

TABLE 5
Oil Content of T5 seed of pZBL120xKS333 and
pZBL120xKS334 Transgenics

| Flat | | Event | | Δ Oil (% | |
|---|---|---|---|---|---|
| ID | Construct | ID | Oil (%) | Points) | Δ Oil (%) |
| A | pZBL120xKS333 | 4445 | 44.9 | 0.7 | 1.5 |
| | | WT | 44.2 | | |
| B | pZBL120xKS333 | 4445 | 45.3 | 1.8 | 4.0 |
| | | WT | 43.6 | | |
| C | pZBL120xKS333 | 4445 | 46.0 | 2.4 | 5.4 |
| | | WT | 43.7 | | |
| D | pZBL120xKS333 | 4445 | 44.6 | 1.4 | 3.2 |
| | | WT | 43.2 | | |
| E | pZBL120xKS333 | 4445 | 43.2 | −0.6 | −1.4 |
| | | WT | 43.8 | | |
| AVG | pZBL120xKS333 | | | 1.1 | 2.5 |
| A | pZBL120xKS334 | 4485 | 45.4 | 2.8 | 6.7 |
| | | WT | 42.5 | | |
| B | pZBL120xKS334 | 4485 | 44.4 | 1.3 | 3.1 |
| | | WT | 43.1 | | |
| C | pZBL120xKS334 | 4485 | 44.5 | 1.7 | 4.0 |
| | | WT | 42.8 | | |
| D | pZBL120xKS334 | 4485 | 45.1 | 1.5 | 3.3 |
| | | WT | 43.7 | | |
| E | pZBL120xKS334 | 4485 | 45.4 | 1.6 | 3.8 |
| | | WT | 43.8 | | |
| AVG | pZBL120xKS334 | | | 1.8 | 4.2 |

[0235] The oil increase associated with presence of the Momordica charantia ODP1 transgene (pZBL120xKS333) is 1.1% points (i.e., an oil increase of 2.5% compared to untransformed WT seed).

[0236] The oil increase associated with presence of the Glycine max ODP1 transgene (pZBL120xKS334) is 1.8% points (i.e., an oil increase of 4.2% compared to untransformed WT seed).

### Example 6

### Compositional Analysis of Arabidopsis Seed Transformed with Zea mays ODP1, Momordica charantia ODP1 or Glycine max ODP1

[0237] T5 seed of Arabidopsis events C00536, 4445 and 4485 carrying pZBL120xKS336 (Zea mays ODP), pZBL120xKS333 (Momordica charantia ODP1) and pZBL120xKS334 (Glycine max ODP1) transgenes, respectively, and WT seed derived from plants grown alongside each of the transgenic events were subjected to compositional analysis as described below. Seed weight was measured by determining the weight of 100 seed. This analysis was performed in triplicate.

[0238] Tissue Preparation:

[0239] Arabidopsis seed (approximately 0.5 g in a ½×2” polycarbonate vial) was ground to a homogeneous paste in a GENOGRINDER® (3×30 sec at 1400 strokes per minute, with a 15 sec interval between each round of agitation). After the second round of agitation the vials were removed and the Arabidopsis paste was scraped from the walls with a spatula prior to the last burst of agitation.

[0240] Determination of Protein Content:

[0241] Protein contents were estimated by combustion analysis on a Thermo FINNIGAN™ Flash 1112EA combustion analyzer running in the NCS mode (vanadium pentoxide was omitted) according to instructions of the manufacturer. Triplicate samples of the ground pastes, 4-8 mg, weighed to an accuracy of 0.001 mg on a METTLER-TOLEDO® MX5 micro balance, were used for analysis. Protein contents were calculated by multiplying % N, determined by the analyzer, by 6.25. Final protein contents were expressed on a % tissue weight basis.

[0242] Determination of Non-Structural Carbohydrate Content:

[0243] Sub-samples (30-35 mg) of the ground paste were weighed (to an accuracy of 0.1 mg) into 13×100 mm glass tubes; the tubes had TEFLON® lined screw-cap closures. Three replicates were prepared for each sample tested.

[0244] Lipid extraction was performed by adding 2 ml aliquots of heptane to each tube. The tubes were vortex mixed and placed into an ultrasonic bath (VWR Scientific Model 750D) filled with water heated to 60° C. The samples were sonicated at full-power (˜360 W) for 15 min and were then centrifuged (5 min×1700 g). The supernatants were transferred to clean 13×100 mm glass tubes and the pellets were extracted 2 more times with heptane (2 ml, second extraction; 1 ml third extraction) with the supernatants from each extraction being pooled. After lipid extraction 1 ml acetone was added to the pellets and after vortex mixing, to fully disperse the material, they were taken to dryness in a Speedvac.

[0245] Non-Structural Carbohydrate Extraction and Analysis:

[0246] Two ml of 80% ethanol was added to the dried pellets from above. The samples were thoroughly vortex mixed until the plant material was fully dispersed in the solvent prior to sonication at 60° C. for 15 min. After centrifugation, 5 min×1700 g, the supernatants were decanted into clean 13×100 mm glass tubes. Two more extractions with 80% ethanol were performed and the supernatants from each were pooled. The extracted pellets were suspended in acetone and dried (as above). An internal standard β-phenyl glucopyranoside (100 μl of a 0.5000+/−0.0010 g/100 ml stock) was added to each extract prior to drying in a Speedvac. The extracts were maintained in a desiccator until further analysis.

[0247] The acetone dried powders from above were suspended in 0.9 ml MOPS (3-N[Morpholino]propane-sulfonic acid; 50 mM, 5 mM CaCl₂, pH 7.0) buffer containing 100 U of heat-stable α-amylase (from Bacillus licheniformis; Sigma A-4551). Samples were placed in a heat block (90° C.) for 75 min and were vortex mixed every 15 min. Samples were then allowed to cool to room temperature and 0.6 ml acetate buffer (285 mM, pH 4.5) containing 5 U amyloglucosidase (Roche 110 202 367 001) was added to each. Samples were incubated for 15-18 h at 55° C. in a water bath fitted with a reciprocating shaker; standards of soluble potato starch (Sigma S-2630) were included to ensure that starch digestion went to completion.

[0248] Post-digestion the released carbohydrates were extracted prior to analysis. Absolute ethanol (6 ml) was added to each tube and after vortex mixing the samples were sonicated for 15 min at 60° C. Samples were centrifuged (5 min×1700 g) and the supernatants were decanted into clean 13×100 mm glass tubes. The pellets were extracted 2 more times with 3 ml of 80% ethanol and the resulting supernatants were pooled. Internal standard (100 ul β-phenyl glucopyranoside, as above) was added to each sample prior to drying in a Speedvac.

[0249] Sample Preparation and Analysis:

[0250] The dried samples from the soluble and starch extractions described above were solubilized in anhydrous pyridine (Sigma-Aldrich P57506) containing 30 mg/ml of hydroxylamine HCl (Sigma-Aldrich 159417). Samples were placed on an orbital shaker (300 rpm) overnight and were then heated for 1 hr (75° C.) with vigorous vortex mixing applied every 15 min. After cooling to room temperature, 1 ml hexamethyldisilazane (Sigma-Aldrich H-4875) and 100 μl trifluoroacetic acid (Sigma-Aldrich T-6508) were added. The samples were vortex mixed and the precipitates were allowed to settle prior to transferring the supernatants to GC sample vials.

[0251] Samples were analyzed on an Agilent 6890 gas chromatograph fitted with a DB-17MS capillary column (15m×0.32 mm×0.25 um film). Inlet and detector temperatures were both 275° C. After injection (2 μl, 20:1 split) the initial column temperature (150° C.) was increased to 180° C. at a rate of 3° C./min and then at 25° C./min to a final temperature of 320° C. The final temperature was maintained for 10 min. The carrier gas was H₂ at a linear velocity of 51 cm/sec. Detection was by flame ionization. Data analysis was performed using Agilent ChemStation software. Each sugar was quantified relative to the internal standard and detector responses were applied for each individual carbohydrate (calculated from standards run with each set of samples). Final carbohydrate concentrations were expressed on a tissue weight basis.

TABLE 6
Composition Analysis of pZBL120xKS336, pZBL120xKS333 and pZBL120xKS334
Transgenic Seed and WT Control Seed

| | | | | Seed | fructose |
|---|---|---|---|---|---|
| | | Oil (%, | | Weight | (μg mg⁻¹ |
| Construct | Event ID | NMR) | Protein % | (μg) | seed) |
| pZBL120xKS336 | C00536 | 46.7 | 15.7 | 24 | 0.6 |
| | WT | 42 | 18.1 | 24 | 1 |
| | Δ TG/WT % | 11.2 | −13.3 | 0.0 | −40.0 |
| | | glucose | sucrose | raffinose | stachyose |
| | | (μg mg⁻¹ | (μg mg⁻¹ | (μg mg⁻¹ | (μg mg⁻¹ |
| Construct | Event ID | seed) | seed) | seed) | seed) |
| pZBL120xKS336 | C00536 | 8.5 | 17.2 | 0.4 | 2.1 |
| | WT | 12.1 | 29.2 | 0.8 | 3.1 |
| | ΔTG/WT % | −29.8 | −41.1 | −50.0 | −32.3 |
| | | | | Seed | fructose |
| | | Oil (%, | | Weight | (μg mg⁻¹ |
| Construct | Event ID | NMR) | Protein % | (μg) | seed) |
| pZBL120xKS333 | 4445 | 46 | 15 | 21.7 | 1 |
| | WT | 43.7 | 14.8 | 20.7 | 1.2 |
| | Δ TG/WT % | 5.3 | 1.4 | 4.8 | −16.7 |
| | | glucose | sucrose | raffinose | stachyose |
| | | (μg mg⁻¹ | (μg mg⁻¹ | (μg mg⁻¹ | (μg mg⁻¹ |
| Construct | Event ID | seed) | seed) | seed) | seed) |
| pZBL120xKS333 | 4445 | 7.8 | 14.6 | 0.5 | 2 |
| | WT | 10.3 | 26.6 | 0.6 | 3.6 |
| | Δ TG/WT % | −24.3 | −45.1 | −16.7 | −44.4 |
| | | | | Seed | fructose |
| | | Oil (%, | | Weight | (μg mg⁻¹ |
| Construct | Event ID | NMR) | Protein % | (μg) | seed) |
| pZBL120xKS334 | 4485 | 45.4 | 14.8 | 20.3 | 0.6 |
| | WT | 42.5 | 14.5 | 20.7 | 0.9 |
| | Δ TG/WT % | 6.8 | 2.1 | −1.9 | −33.3 |
| | | glucose | sucrose | raffinose | stachyose |
| | | (μg mg⁻¹ | (μg mg⁻¹ | (μg mg⁻¹ | (μg mg⁻¹ |
| Construct | Event ID | seed) | seed) | seed) | seed) |
| pZBL120xKS334 | 4485 | 6.3 | 11.7 | 0.5 | 1.6 |
| | WT | 10.4 | 30.4 | 0.7 | 3.3 |
| | Δ TG/WT % | −39.4 | −61.5 | −28.6 | −51.5 |

[0252] Table 6 shows that a reduction of soluble carbohydrates is consistently associated with presence of the pZBL120xKS333, 334 and 336 transgenes. There is no consistent change in protein content or seed weight that can be attributed to the pZBL120xKS333, 334 and 336 transgenes.

### Example 7

### Germination Assays of Arabidopsis Seed Transformed with Zea mays ODP1, Momordica charantia ODP1 or Glycine max ODP1

[0253] T5 seed of Arabidopsis events C00536, 4445 and 4485 carrying pZBL120xKS336 (Zea mays ODP1), pZBL120xKS333 (Momordica charantia ODP1) and pZBL120xKS334 (Glycine max ODP1) transgenes, respectively, were subjected to germination assays on standard Arabidopsis growth media (see above) containing either 10 g L⁻¹ sucrose or equimolar amounts of sorbitol (5.3 g L⁻¹). Seeds were surface-sterilized and homogeneous dispersion of the seed on the medium was facilitated by mixing the aqueous seed suspension with an equal volume of melted plant growth medium containing the either sucrose or sorbitol. Plates were incubated under standard conditions (22° C., 16 h light/8 h dark, 100 μE m⁻²s⁻¹) and germination rate and seedling phenotype was scored 14 days after plating (Table 7).

TABLE 7
Germination Assays for pZBL120xKS336, pZBL120xKS333
and pZBL120xKS334 Transgenic Seeds

| | | | Altered | | |
|---|---|---|---|---|---|
| | | Total | Seedling | No | Healthy |
| | Media | Seed | Morphology | Germination | Seedlings |
| Line ID | Type | (#) | (#) | (#) | (#) |
| C00536 | sucrose | 93 | 69 | 2 | 22 |
| C00536 | sucrose | 84 | 50 | 3 | 31 |
| C00536 | sucrose | 90 | 73 | 3 | 14 |
| C00536 | sorbitol | 95 | 6 | 89 | 0 |
| C00536 | sorbitol | 112 | 24 | 88 | 0 |
| C00536 | sorbitol | 100 | 49 | 51 | 0 |
| 4445 | sucrose | 82 | 24 | 22 | 36 |
| 4445 | sucrose | 63 | 24 | 7 | 32 |
| 4445 | sucrose | 94 | 36 | 12 | 46 |
| 4445 | sorbitol | 106 | 70 | 36 | 0 |
| 4445 | sorbitol | 119 | 77 | 42 | 0 |
| 4445 | sorbitol | 106 | 97 | 9 | 0 |
| 4485 | sucrose | 98 | 50 | 48 | 0 |
| 4485 | sucrose | 109 | 37 | 70 | 2 |
| 4485 | sucrose | 129 | 80 | 39 | 10 |
| 4485 | sorbitol | 131 | 24 | 107 | 0 |
| 4485 | sorbitol | 128 | 25 | 103 | 0 |
| 4485 | sorbitol | 127 | 23 | 102 | 2 |
| | | | Altered | | |
| | | | Seedling | No | Healthy |
| | Media | | Morphology | Germination | Seedlings |
| Line ID | Type | | (%) | (%) | (%) |
| C00536 | sucrose | | 74.2 | 2.2 | 23.7 |
| C00536 | sucrose | | 59.5 | 3.6 | 36.9 |
| C00536 | sucrose | | 81.1 | 3.3 | 15.6 |
| | | AVG | 71.6 | 3.0 | 25.4 |
| C00536 | sorbitol | | 6.3 | 93.7 | 0.0 |
| C00536 | sorbitol | | 21.4 | 78.6 | 0.0 |
| C00536 | sorbitol | | 49.0 | 51.0 | 0.0 |
| | | AVG | 25.6 | 74.4 | 0.0 |
| 4445 | sucrose | | 29.3 | 26.8 | 43.9 |
| 4445 | sucrose | | 38.1 | 11.1 | 50.8 |
| 4445 | sucrose | | 38.3 | 12.8 | 48.9 |
| | | AVG | 35.2 | 16.9 | 47.9 |
| 4445 | sorbitol | | 66.0 | 34.0 | 0.0 |
| 4445 | sorbitol | | 64.7 | 35.3 | 0.0 |
| 4445 | sorbitol | | 91.5 | 8.5 | 0.0 |
| | | AVG | 74.1 | 25.9 | 0.0 |
| 4485 | sucrose | | 51.0 | 49.0 | 0.0 |
| 4485 | sucrose | | 33.9 | 64.2 | 1.8 |
| 4485 | sucrose | | 62.0 | 30.2 | 7.8 |
| | | AVG | 49.0 | 47.8 | 3.2 |
| 4485 | sorbitol | | 18.3 | 81.7 | 0.0 |
| 4485 | sorbitol | | 19.5 | 80.5 | 0.0 |
| 4485 | sorbitol | | 18.1 | 80.3 | 1.6 |
| | | AVG | 18.7 | 80.8 | 0.5 |

[0254] It is evident that germination and/or seedling development is significantly affected in all events analyzed. Germination is improved in the presence of sucrose; however, in events carrying pZBL120xKS336 and pZBL120xKS334 the seed germinating on sucrose containing media gave rise to seedlings with altered morphology, namely the presence of leaf structures that fail to become green and which resemble non-photosynthetic cotyledon tissue.

[0255] Total fatty acid (FA) composition and content of seedling tissue of C00536, 4485 and WT seedlings were measured 14 days after plating on media containing 10 g L⁻¹ sucrose. Briefly, seedling tissue was frozen on dry ice or by incubation in a −80° C. freezer for two h followed by lyophilization for 48 h.

[0256] Dried seedling tissue was ground to a fine powder using a GENOGRINDER® vial (½″X2″ polycarbonate) and a steel ball (SPEX Centriprep (Metuchen, N.J., U.S.A.). Grinding time was 30 sec at 1450 oscillations per min. Ten mg of tissue were weighed into Eppendorf tubes. The tissue was extracted using 100 μL heptane at room temperature under continuous shaking for 2 h. Heptane extracts were cleared by centrifugation and 25 μL of extract was derivatized to fatty acid methyl esters as follows. One mL of a 25% sodium methoxide stock solution was added to 24 mL of HPLC grade methanol. Sodium methoxide was stored under an inert gas.

[0257] Five μL of a 17:0 TAG (Nu-Chek Prep, Elysian, Minn., USA) stock solution (10 mg/mL) was combined with 25 μL of heptane tissue extract in a glass culture tube and 500 μL of 1% sodium methoxide was added. Samples were derivatized in a water bath at 50° C. for 15 min. Samples were allowed to cool to RT and 1 mL of 1M NaCl was added followed by brief mixing. FAMEs were extracted into 1 mL of heptane and 4 μL sample were quantitated by GC analysis (Table 8).

TABLE 8
Fatty Acid Composition and Total Fatty Acid Content of Seedling Tissue of WT
Plants and pZBL120xKS334 and pZBL120xKS336 Transgenic Plants Grown on
Sucrose-Containing Media

| | | | | | | | | | | Total |
|---|---|---|---|---|---|---|---|---|---|---|
| | % Total FA | | | | | | | | | FA |
| Event ID | 16:0 | 18:0 | 18:1 | 18:2 | 18:3 | 20:0 | 20:1 | 20:2 | 22:0 | (% DW) |
| WT | 13.5 | 10.0 | 42.3 | 15.2 | 15.6 | 1.0 | 0.9 | 0.0 | 1.5 | 4.3 |
| 4485 | 11.8 | 2.7 | 13.2 | 26.6 | 26.7 | 2.5 | 13.5 | 2.2 | 0.7 | 18.6 |
| C00536 | 7.9 | 2.3 | 15.0 | 17.7 | 32.4 | 3.2 | 18.2 | 2.0 | 1.2 | 21.9 |

[0258] Table 8 demonstrates that seedling tissue of transgenic lines carrying pZBL120xKS334 and pZBL120xKS336 transgenes showed increased fatty acid content when compared to WT seedlings. Moreover, the fatty acid profile of transgenic seedling tissue is similar to that of Arabidopsis WT seed in that it contains significant levels (>15%) of C20 fatty acids.

[0259] In summary, use of a strong heterologous seed storage protein promoter (soybean β-conglycinin promoter) for expression in Arabidopsis of ODP1 genes from a diverse range of plant species belonging to the families of Leguminosae, Cucurbitaceae and Poaceae, resulted in increased seed storage lipid accumulation at the expense of soluble carbohydrates. However, seed germination and seedling establishment was negatively affected in transgenic lines expressing ODP1 genes under control of a strong heterologous seed storage protein promoter.

### Example 8

### Construction of Arabidopsis Expression Vector pKR1223 for Expression of Zea mays ODP Under Control of the Seed-Specific, Low Strength Arabidopsis Sucrose Synthase Promoter

[0260] The present example describes the synthesis of Arabidopsis expression vector pKR1223 which allows for expression of the Zea mays ODP gene under control of the promoter of an Arabidopsis sucrose synthase gene (At5g49190). Additionally, vector pKR1223 provides seed-specific expression of the DsRed gene in order to visualize positive transformants as well as constitutive expression of the npt gene for selection on kanamycin.

[0261] Plasmid pKR132 (SEQ ID NO:16) which is described in PCT Publication No. WO 2004/071467 (the contents of which are incorporated by reference), was digested with BamHI/SalI and the fragment containing the soy albumin promoter was cloned into the BamHI/XhoI fragment of the pCR-Blunt® cloning vector (Invitrogen Corporation) to produce the starting vector pKR627 (SEQ ID NO:17).

[0262] Plasmid KS294 (SEQ ID NO:18) contains a NotI site flanked by the SCP1 promoter and the phaseolin transcription terminator (SCP1Pro::NotI::PhasTerm). The SCP1 promoter is a synthetic constitutive promoter comprising a portion of the CaMV 35S promoter (Odell et al. (1985) Nature 313:810-812) and the Rsyn7-Syn II Core synthetic consensus promoter (U.S. Pat. Nos. 6,072,050 and 6,555,673, the contents of which are incorporated by reference). See also, for example, US20030226166, Table 13 (the contents of which are incorporated by reference). Downstream of this element is the Tobacco Mosaic Virus (TMV) omega 5′-UTR translational enhancer element (Gallie et al. (1992) Nucleic Acid Research 20:4631-4638), followed by the NotI site and the 3′ transcription termination region of the phaseolin gene (Doyle et al., (1986) J. Biol. Chem. 261:9228-9238). The XbaI fragment of KS294 (SEQ ID NO:18), containing the SCP1Pro::NotI::PhasTerm cassette, was cloned into the XbaI site of pKR627 (SEQ ID NO:17) to produce pKR1142 (SEQ ID NO:19).

[0263] The BamHI fragment of KS334 (SEQ ID NO:14; Example 1), containing the Kti3Pro:DsRed:Kti3Term cassette, was cloned into the BamHI site of pKR278 (SEQ ID NO:20), which was previously described in U.S. Patent Publication No. US20080095915 (the contents of which are incorporated by reference), to produce vector pKR1141 (SEQ ID NO:20).

[0264] Genomic DNA was isolated from 3 week-old wild-type Arabidopsis col-0 seedlings using the DNEASY® Plant Mini Kit (Qiagen, Valencia, Calif.) and following the manufacture's protocol. An Arabidopsis Sucrose Synthase (“AtSuSy”; “AtSUS2”) promoter derived from gene At5g49190 was PCR-amplified from Arabidopsis genomic DNA using oligonucleotides SuSy-5 (SEQ ID NO:21) and SuSy-3 (SEQ ID NO:22) with the PHUSION™ High-Fidelity DNA Polymerase (Cat. No. F553S, Finnzymes Oy, Finland), following the manufacturer's protocol. The resulting DNA fragment was cloned into the pCR®-BLUNT® cloning vector using the ZERO BLUNT® PCR Cloning Kit (Invitrogen Corporation), following the manufacturer's protocol, to produce pLF122 (SEQ ID NO:23).

[0265] The BamHI/NotI fragment of pLF122 (SEQ ID NO:23), containing the AtSuSy promoter, was cloned into the BamHI/NotI fragment of pKR1142 (SEQ ID NO:19), containing the phaseolin terminator, to produce pKR1155 (SEQ ID NO:24).

[0266] The Asp718/BsiWI fragment of pKR1155 (SEQ ID NO:24), containing the AtSuSy promoter, was cloned into the BsiWI site of pKR1141 (SEQ ID NO:20), to produce pKR1158 (SEQ ID NO:25).

[0267] The NotI fragment of KS336 (SEQ ID NO:6; Example 1), containing the corn ODP, was cloned into the NotI site of pKR1158 (SEQ ID NO:25), to produce pKR1167 (SEQ ID NO:26).

[0268] The AscI fragment of pKR1167 (SEQ ID NO:26), containing the corn ODP gene, was cloned into the AscI fragment of pKR92 (SEQ ID NO:27) which was previously described in WO2007/061845 (published on May 31, 2007, the contents of which are herein incorporated by reference) to produce pKR1223 (SEQ ID NO:28).

### Example 9

### Construction of Arabidopsis Expression Vector pKR1220 for Expression of the Corn ODP Under Control of the Seed-Specific, Medium-Strength Soy Annexin Promoter

[0269] The present example describes the synthesis of Arabidopsis expression vector pKR1220 which allows for seed-specific expression of the corn ODP gene under control of the soy annexin promoter. Additionally, vector pKR1220 provides seed-specific expression of the DsRed gene in order to visualize positive transformants and constituitive expression of the npt gene for selection on kanamycin.

[0270] The BsiWI fragment of pKR268 (SEQ ID NO:29; which is described in PCT Publication No. WO 04/071467, the contents of which are herein incorporated by reference), containing the AnnexinPro::NotI::BD30Term cassette, was cloned into the BsiWI site of pKR1141 (SEQ ID NO:20) to give pKR1143 (SEQ ID NO:30).

[0271] The NotI fragment of KS336 (SEQ ID NO:6), containing the corn ODP1 gene, was cloned into the NotI site of pKR1143 (SEQ ID NO:30), to produce pKR1147 (SEQ ID NO:31).

[0272] The AscI fragment of pKR1147 (SEQ ID NO:31), containing the corn ODP1 gene, was cloned into the AscI fragment of pKR92 (SEQ ID NO:27) to produce pKR1220 (SEQ ID NO:32).

### Example 10

### Construction of Arabidopsis Expression Vector pKR1221 for Expression of the Corn ODP Under Control of the Constitutive, Medium Strength SCP1 Promoter

[0273] The present example describes the synthesis of Arabidopsis expression vector pKR1221 which allows for constituitive expression of the corn ODP1 gene under control of the SCP1 promoter. Additionally, vector pKR1221 provides seed-specific expression of the DSred gene in order to visualize positive transformants and constituitive expression of the npt gene for selection on kanamycin.

[0274] The Asp718/BsiWI fragment of pKR1142 (SEQ ID NO:19), containing the SCP1Pro::NotI::PhasTerm cassette, was cloned into the BsiWI site of pKR1141 (SEQ ID NO:20), to produce pKR1144 (SEQ ID NO:33).

[0275] The NotI fragment of KS336 (SEQ ID NO:6), containing the corn ODP1, was cloned into the NotI site of pKR1144 (SEQ ID NO:33), to produce pKR1149 (SEQ ID NO:34).

[0276] The AscI fragment of pKR1149 (SEQ ID NO:34), containing the corn ODP1 gene, was cloned into the AscI fragment of pKR92 (SEQ ID NO:27) to produce pKR1221 (SEQ ID NO:35).

### Example 11

### Generation and Analysis of T2 Seed of Arabidopsis Lines Transformed with Corn ODP Under Control of the SCP1, Annexin or Sucrose Synthase Promoters

[0277] Plasmid DNA of pKR1220, pKR1221 and pKR1223 was introduced into Agrobacterium tumefaciens NTL4 (Luo et al, Molecular Plant-Microbe Interactions (2001) 14(1):98-103) by electroporation. Briefly, 1 μg plasmid DNA was mixed with 100 μL of electro-competent cells on ice. The cell suspension was transferred to a 100 μL electroporation cuvette (1 mm gap width) and electroporated using a BIORAD electroporator set to 1 kV, 400Ω and 25 μF. Cells were transferred to 1 mL LB medium and incubated for 2 h at 30° C. Cells were plated onto LB medium containing 50 μg/mL kanamycin. Plates were incubated at 30° C. for 60 h. Recombinant Agrobacterium cultures (500 mL LB, 50 μg/mL kanamycin) were inoculated from single colonies of transformed Agrobacterium cells and grown at 30° C. for 60 h. Cells were harvested by centrifugation (5000×g, 10 min) and resuspended in 1 L of 5% (W/V) sucrose containing 0.05% (V/V) Silwet. Arabidopsis plants were grown in soil at a density of 30 plants per 100 cm² pot in METRO-MIX® 360 soil mixture for 4 weeks (22° C., 16 h light/8 h dark, 100 μE m⁻²s⁻¹). Plants were repeatedly dipped into the Agrobacterium suspension harboring the relevant binary vector and kept in a dark, high humidity environment for 24 h. Plants were grown for three to four weeks under standard plant growth conditions described above and plant material was harvested and dried for one week at ambient temperatures in paper bags. Seeds were harvested using a 0.425 mm mesh brass sieve.

[0278] Cleaned Arabidopsis seeds (2 grams, corresponding to about 100,000 seeds) were sterilized by washes in 45 mL of 80% ethanol, 0.01% TRITON® X-100, followed by 45 mL of 30% (V/V) household bleach in water, 0.01% TRITON®X-100 and finally by repeated rinsing in sterile water. Aliquots of 20,000 seeds were transferred to square plates (20×20 cm) containing 150 mL of sterile plant growth medium comprised of 0.5×MS salts, 0.53% (W/V) sorbitol, 0.05 MES/KOH (pH 5.8), 200 μg/mL TIMENTIN®, and 50 μg/mL kanamycin solidified with 10 g/L agar. Homogeneous dispersion of the seed on the medium was facilitated by mixing the aqueous seed suspension with an equal volume of melted plant growth medium. Plates were incubated under standard growth conditions for ten days. Kanamycin-resistant seedlings were transferred to plant growth medium without selective agent and grown for one week before transfer to soil. Plants were grown to maturity and T2 seeds were harvested and plated on selective media containing kanamycin. Approximately 100 events were generated in this manner. Wild-type control plants were grown in the same flat containing transgenic T1 plants. T2 seeds were harvested and oil content was measured by NMR (Tables 9 and 10).

TABLE 9
Data from Germination Assays for T2 Seed of pKR1220, pKR1221 and pKR1223
Transgenics on Selective Medium Containing Kanamycin and Sorbitol

| | | Total | Transgenic | | | No | Healthy | |
|---|---|---|---|---|---|---|---|---|
| Event | | Seed | Seed | ASM* | Kan^{S} | Germination | SeedLings | Δ Oil % |
| ID | pKR | (#) | (#) | (#) | (#) | (#) | (#) | points |
| 35634 | 1220 | 122 | 110 | 11 | 12 | 31 | 68 | 2.6 |
| 36062 | 1220 | 134 | 127 | 25 | 7 | 85 | 17 | 2.4 |
| 35637 | 1220 | 147 | 133 | 16 | 14 | 100 | 17 | 2.4 |
| 36066 | 1220 | 143 | 123 | 22 | 20 | 59 | 42 | 2 |
| 35636 | 1220 | 116 | 105 | 19 | 11 | 62 | 24 | 1.7 |
| 36059 | 1220 | 101 | 85 | 14 | 16 | 52 | 19 | 1.6 |
| 36104 | 1221 | 104 | 104 | 6 | 0 | 96 | 2 | 4.7 |
| 36078 | 1221 | 83 | 66 | 0 | 17 | 66 | 0 | 3 |
| 36087 | 1221 | 93 | 89 | 0 | 4 | 89 | 0 | 2 |
| 36090 | 1221 | 103 | 103 | 1 | 0 | 98 | 4 | 1.9 |
| 36101 | 1221 | 134 | 126 | 0 | 8 | 126 | 0 | 1.7 |
| 36122 | 1221 | 108 | 92 | 0 | 16 | 92 | 0 | 1.7 |
| 36162 | 1223 | 92 | 83 | 8 | 9 | 20 | 55 | 5.3 |
| 36210 | 1223 | 112 | 111 | 2 | 1 | 21 | 88 | 4.4 |
| 36151 | 1223 | 144 | 142 | 66 | 2 | 40 | 36 | 3.6 |
| 36194 | 1223 | 94 | 91 | 14 | 3 | 11 | 66 | 3.4 |
| 36157 | 1223 | 101 | 77 | 14 | 24 | 10 | 53 | 3.4 |
| 36181 | 1223 | 160 | 149 | 15 | 11 | 88 | 46 | 3.3 |
| 36199 | 1223 | 103 | 95 | 17 | 8 | 12 | 66 | 3.2 |
| 36208 | 1223 | 119 | 110 | 22 | 9 | 20 | 68 | 3.1 |
| 36161 | 1223 | 134 | 120 | 19 | 14 | 33 | 68 | 3 |
| 36200 | 1223 | 144 | 140 | 0 | 4 | 101 | 39 | 2.8 |
| 36154 | 1223 | 110 | 99 | 10 | 11 | 7 | 82 | 2.7 |
| 36209 | 1223 | 109 | 106 | 10 | 3 | 31 | 65 | 2.6 |
| 36179 | 1223 | 172 | 147 | 10 | 25 | 68 | 69 | 2.6 |
| 36180 | 1223 | 162 | 149 | 16 | 13 | 51 | 82 | 2.6 |
| 36213 | 1223 | 146 | 127 | 22 | 19 | 57 | 48 | 2.4 |
| 36206 | 1223 | 86 | 79 | 17 | 7 | 0 | 62 | 2.2 |

*“ASM” denotes Altered Seedling Morphology

TABLE 10
Results from Germination Assays for T2 Seed of pKR1220,
pKR1221 and pKR1223 Transgenics on Selective Medium
Containing Kanamycin and Sorbitol

| | | | | | |
|---|---|---|---|---|---|
| | | | % No | % Healthy | Δ Oil % |
| Event ID | pKR | % ASM* | Germination | Seedlings | Points |

| | | | | | |
|---|---|---|---|---|---|
| 35634 | 1220 | 10.0 | 28.2 | 61.8 | 2.6 |
| 36062 | 1220 | 19.7 | 66.9 | 13.4 | 2.4 |
| 35637 | 1220 | 12.0 | 75.2 | 12.8 | 2.4 |
| 36066 | 1220 | 17.9 | 48.0 | 34.1 | 2.0 |
| 35636 | 1220 | 18.1 | 59.0 | 22.9 | 1.7 |
| 36059 | 1220 | 16.5 | 61.2 | 22.4 | 1.6 |
| | AVG | 15.7 | 56.4 | 27.9 | 2.1 |
| 36104 | 1221 | 5.8 | 92.3 | 1.9 | 4.7 |
| 36078 | 1221 | 0.0 | 100.0 | 0.0 | 3.0 |
| 36087 | 1221 | 0.0 | 100.0 | 0.0 | 2.0 |
| 36090 | 1221 | 1.0 | 95.1 | 3.9 | 1.9 |
| 36101 | 1221 | 0.0 | 100.0 | 0.0 | 1.7 |
| 36122 | 1221 | 0.0 | 100.0 | 0.0 | 1.7 |
| | AVG | 1.1 | 97.9 | 1.0 | 2.5 |
| 36162 | 1223 | 9.6 | 24.1 | 66.3 | 5.3 |
| 36210 | 1223 | 1.8 | 18.9 | 79.3 | 4.4 |
| 36151 | 1223 | 46.5 | 28.2 | 25.4 | 3.6 |
| 36194 | 1223 | 15.4 | 12.1 | 72.5 | 3.4 |
| 36157 | 1223 | 18.2 | 13.0 | 68.8 | 3.4 |
| 36181 | 1223 | 10.1 | 59.1 | 30.9 | 3.3 |
| 36199 | 1223 | 17.9 | 12.6 | 69.5 | 3.2 |
| 36208 | 1223 | 20.0 | 18.2 | 61.8 | 3.1 |
| 36161 | 1223 | 15.8 | 27.5 | 56.7 | 3.0 |
| 36200 | 1223 | 0.0 | 72.1 | 27.9 | 2.8 |
| 36154 | 1223 | 10.1 | 7.1 | 82.8 | 2.7 |
| 36209 | 1223 | 9.4 | 29.2 | 61.3 | 2.6 |
| 36179 | 1223 | 6.8 | 46.3 | 46.9 | 2.6 |
| 36180 | 1223 | 10.7 | 34.2 | 55.0 | 2.6 |
| 36213 | 1223 | 17.3 | 44.9 | 37.8 | 2.4 |
| 36206 | 1223 | 21.5 | 0.0 | 78.5 | 2.2 |
| | AVG | 14.4 | 28.0 | 57.6 | 3.2 |

*“ASM” denotes Altered Seedling Morphology

### Example 12

### Analysis of T3 and T4 Seed of Arabidopsis Plants Transformed with Zea mays ODP Under Control of the Arabidopsis Sucrose Synthase Promoter

[0279] T2 seeds of pKR1223 transformation events 36162, 36180 and 36181 were germinated on selective media containing kanamycin. Twenty-four kanamycin-resistant seedlings were planted in soil along side twelve untransformed WT Arabidopsis plants. Plants were grown to maturity and T3 seed samples were harvested from individual T2 plants. A bulk seed sample was generated from all WT plants in a given flat. Oil content was measured by NMR (Table 11).

TABLE 11
Oil Content of T3 Seed of pKR1223 Transgenics

| Event | Plant # | % oil |
|---|---|---|
| 36162 | 1 | 44.6 |
| 36162 | 2 | 44.5 |
| 36162 | 3 | 44.4 |
| 36162 | 4 | 44.3 |
| 36162 | 5 | 44.3 |
| 36162 | 6 | 44.2 |
| 36162 | 7 | 44.2 |
| 36162 | 8 | 43.9 |
| 36162 | 9 | 43.8 |
| 36162 | 10 | 43.7 |
| 36162 | 11 | 43.7 |
| 36162 | 12 | 43.7 |
| 36162 | 13 | 43.7 |
| 36162 | 14 | 43.7 |
| 36162 | 15 | 43.6 |
| 36162 | 16 | 43.5 |
| 36162 | 17 | 43.5 |
| 36162 | 18 | 43.5 |
| 36162 | 19 | 43.4 |
| 36162 | 20 | 43.0 |
| 36162 | 21 | 42.8 |
| 36162 | 22 | 42.2 |
| 36162 | 23 | 41.8 |
| 36162 | 24 | 36.4 |
| 36162 | AVG | 43.4 |
| WT in | AVG | 41.8 |
| 36162 | | |
| Exp. | | |
| 36180 | 1 | 44.5 |
| 36180 | 2 | 44.3 |
| 36180 | 3 | 43.8 |
| 36180 | 4 | 43.8 |
| 36180 | 5 | 43.7 |
| 36180 | 6 | 43.6 |
| 36180 | 7 | 43.6 |
| 36180 | 8 | 43.6 |
| 36180 | 9 | 43.5 |
| 36180 | 10 | 43.4 |
| 36180 | 11 | 43.3 |
| 36180 | 12 | 43.3 |
| 36180 | 13 | 43.3 |
| 36180 | 14 | 43.3 |
| 36180 | 15 | 43.2 |
| 36180 | 16 | 43.2 |
| 36180 | 17 | 43.1 |
| 36180 | 18 | 43.1 |
| 36180 | 19 | 42.9 |
| 36180 | 20 | 42.9 |
| 36180 | 21 | 42.8 |
| 36180 | 22 | 42.8 |
| 36180 | 23 | 42.7 |
| 36180 | 24 | 42.6 |
| 36180 | AVG | 43.3 |
| WT in | AVG | 41.9 |
| 36180 | | |
| Exp. | | |
| 36181 | 1 | 47.2 |
| 36181 | 2 | 46.3 |
| 36181 | 3 | 46.2 |
| 36181 | 4 | 46.1 |
| 36181 | 5 | 45.9 |
| 36181 | 6 | 45.7 |
| 36181 | 7 | 45.4 |
| 36181 | 8 | 45.0 |
| 36181 | 9 | 45.0 |
| 36181 | 10 | 45.0 |
| 36181 | 11 | 45.0 |
| 36181 | 12 | 44.9 |
| 36181 | 13 | 44.9 |
| 36181 | 14 | 44.8 |
| 36181 | 15 | 44.7 |
| 36181 | 16 | 44.6 |
| 36181 | 17 | 44.5 |
| 36181 | 18 | 44.4 |
| 36181 | 19 | 44.4 |
| 36181 | 20 | 43.8 |
| 36181 | 21 | 43.8 |
| 36181 | 22 | 43.6 |
| 36181 | 23 | 43.3 |
| 36181 | 24 | 42.6 |
| 36181 | AVG | 44.9 |
| WT in | AVG | 41.9 |
| 36181 | | |
| Exp. | | |

[0280] Transgenic T3 seed selections of events 36180 and 36162 that no longer segregated for the DsRed marker gene were identified by visual inspection using a suitable light source. These T3 selections that were homozygous for the pKR1223 transgene were subjected to germination assays on plant growth media containing sucrose or sorbitol as described above (Table 12).

TABLE 12
Germination Assays for T3 Seed of pKR1223 Transgenics

| | | Total | | No | Healthy |
|---|---|---|---|---|---|
| | Media | Seed | ASM* | Germination | Seedlings |
| Event | Type | (#) | (#) | (#) | (#) |
| 36180 | sucrose | 83 | 0 | 0 | 83 |
| 36180 | sucrose | 111 | 0 | 0 | 111 |
| 36180 | sucrose | 110 | 0 | 0 | 110 |
| 36180 | sorbitol | 121 | 0 | 0 | 121 |
| 36180 | sorbitol | 128 | 0 | 0 | 128 |
| 36180 | sorbitol | 118 | 0 | 0 | 118 |
| 36162 | sucrose | 88 | 0 | 0 | 88 |
| 36162 | sucrose | 111 | 1 | 1 | 109 |
| 36162 | sucrose | 90 | 0 | 0 | 90 |
| 36162 | sorbitol | 97 | 0 | 0 | 97 |
| 36162 | sorbitol | 103 | 0 | 0 | 103 |
| 36162 | sorbitol | 107 | 2 | 0 | 105 |
| | | | | No | Healthy |
| | Media | | ASM* | Germination | Seedlings |
| Event | Type | | (%) | (%) | (%) |
| 36180 | sucrose | | 0.0 | 0.0 | 100.0 |
| 36180 | sucrose | | 0.0 | 0.0 | 100.0 |
| 36180 | sucrose | | 0.0 | 0.0 | 100.0 |
| 36180 | sucrose | AVG | 0.0 | 0.0 | 100.0 |
| 36180 | sorbitol | | 0.0 | 0.0 | 100.0 |
| 36180 | sorbitol | | 0.0 | 0.0 | 100.0 |
| 36180 | sorbitol | | 0.0 | 0.0 | 100.0 |
| 36180 | sorbitol | AVG | 0.0 | 0.0 | 100.0 |
| 36162 | sucrose | | 0.0 | 0.0 | 100.0 |
| 36162 | sucrose | | 0.9 | 0.9 | 98.2 |
| 36162 | sucrose | | 0.0 | 0.0 | 100.0 |
| 36162 | sucrose | AVG | 0.3 | 0.3 | 99.4 |
| 36162 | sorbitol | | 0.0 | 0.0 | 100.0 |
| 36162 | sorbitol | | 0.0 | 0.0 | 100.0 |
| 36162 | sorbitol | | 1.9 | 0.0 | 98.1 |
| 36162 | sorbitol | AVG | 0.6 | 0.0 | 99.4 |

*“ASM” denotes Altered Seedling Morphology

[0281] Transgenic T3 seed selections of events 36180 and 36162 that no longer segregated for the DsRed marker gene were identified by visual inspection using a suitable light source. In case of event 36181 no T3 seed selections could be identified that did not segregate for the DS red marker in a total of 24 progeny seed samples derived from 24 kanamycin-resistant T2 plants. Moreover, when T3 seed were plated on selective agarose media, 25% of seed failed to germinate and 25% of the seedlings were sensitive to kanamycin. It is concluded that the transgene insertion in event 36181 can only be maintained in the heterozygous state. The homozygous nature of T3 seed selections of events 36180 and 36162 suggests that the seed phenotype of event 36181 is related to the transgene insertion site and not the transgene itself. It is believed that a gene that is important for development of viable seed was disrupted by the transgene insertion.

[0282] T3 seed selections of events 36180 and 36162 that were homozygous for the transgene insertion and T3 seed selections of event 36181 that were heterozygous for the transgene insertion were germinated on selective media containing kanamycin. Three flats were planted for every transgenic event as follows: 24 seedlings were planted in each flat next to 12 WT seedlings at identical developmental stage. Plants were grown to maturity for approximately eight weeks and seed were harvested in bulk from all transgenic and WT plants in a given flat. Oil content of seed was measured by NMR as described in Example 1. Results are summarized in Table 13. In all three events presence of the pKR1223-derived transgene leads to an increase in oil content that ranges between 0.7 and 2.2% points (1.6-5.4%).

TABLE 13
Oil Content of T4 Seed of pKR1223 Transgenics

| | Event | | Δ Oil (% | |
|---|---|---|---|---|
| Flat ID | ID | Oil (%) | Points) | Δ Oil (%) |
| A | 36181 | 42.8 | 2.2 | 5.4 |
| | WT | 40.6 | | |
| B | 36181 | 43.5 | 2.1 | 5.2 |
| | WT | 41.4 | | |
| C | 36181 | 40.8 | 1.5 | 4.0 |
| | WT | 39.2 | | |
| | | AVG | 2.0 | 4.9 |
| A | 36180 | 44.5 | 1.8 | 4.2 |
| | WT | 42.7 | | |
| B | 36180 | 43.6 | 1.9 | 4.6 |
| | WT | 41.7 | | |
| C | 36180 | 43.2 | 1.2 | 2.8 |
| | WT | 42.0 | | |
| | | AVG | 1.6 | 3.9 |
| A | 36162 | 43.3 | 1.4 | 3.4 |
| | WT | 41.9 | | |
| B | 36162 | 43.6 | 0.7 | 1.6 |
| | WT | 42.9 | | |
| C | 36162 | 43.8 | 1.0 | 2.4 |
| | WT | 42.7 | | |
| | | AVG | 1.0 | 2.5 |

[0283] T4 seed of events 36162 and 36180 were subjected to compositional analysis as described in Example 6.

TABLE 14
Composition of pKR1223 Transgenic T4 Seed and WT Control Seed

| | Oil (%, | | Seed | Fructose (μg |
|---|---|---|---|---|
| Event | NMR) | Protein (%) | Weight (μg) | mg⁻¹ seed) |
| 36162 | 43.3 | 14.94 | 20.33 | 2.13 |
| WT | 41.9 | 15.05 | 19 | 2.39 |
| Δ TG/WT % | 3.3 | −0.7 | 7.0 | −10.9 |
| | Glucose | Sucrose | Raffinose | |
| | (μg mg⁻¹ | (μg mg⁻¹ | (μg mg⁻¹ | Stachyose (μg |
| Event | seed) | seed) | seed) | mg⁻¹ seed) |
| 36162 | 4.82 | 11.32 | 0.56 | 1.52 |
| WT | 5.17 | 14.28 | 0.64 | 1.58 |
| ΔTG/WT % | −6.8 | −20.7 | −12.5 | −3.8 |

| | Oil (%, | | Seed | Fructose (μg |
|---|---|---|---|---|
| Event | NMR) | Protein (%) | Weight (μg) | mg⁻¹ seed) |
| 36180 | 43.6 | 15.17 | 21 | 2.07 |
| WT | 41.7 | 15.16 | 21 | 2.45 |
| Δ TG/WT % | 4.6 | 0.1 | 0.0 | −15.5 |

| | Glucose | Sucrose | Raffinose | |
|---|---|---|---|---|
| | (μg mg⁻¹ | (μg mg⁻¹ | (μg mg⁻¹ | Stachyose (μg |
| Event | seed) | seed) | seed) | mg⁻¹ seed) |
| 36180 | 4.49 | 11.14 | 0.5 | 1.46 |
| WT | 4.97 | 14.08 | 0.57 | 1.45 |
| Δ TG/WT % | −9.7 | −20.9 | −12.3 | 0.7 |

[0284] A reduction of soluble carbohydrates (mainly sucrose) was consistently associated with the presence of the pKR1223 transgene in events 36162 and 36180. There was no consistent change in protein content or seed weight that can be attributed to the presence of the transgene.

[0285] In summary, use of a promoter of the Arabidopsis sucrose synthase (SUS2) gene (At5g49190) for expression of maize ODP1 resulted in increased seed storage lipid accumulation at the expense of soluble carbohydrates. Seed germination and seedling establishment was not affected.

### Example 13

### Identification of Seed Specific Promoters to Drive ODP1 Expression in Cruciferous Oilseed Plants

[0286] The sucrose synthase gene family and the role of specific gene family members during seed development, specifically the mobilization of sucrose for seed storage compound biosynthesis, has been described (Ruuska S A, Girke T, Benning C and Ohlrogge J B (2002) Contrapuntal networks of gene expression during Arabidopsis seed filling. Plant Cell 14: 1191-1206; Baud S, Vaultier M-N and Rochat C (2004) Structure and expression profile of the sucrose synthase multigene family in Arabidopsis. J Exp Bot 55: 397-409; and Baud S and Graham I A (2006) A spatiotemporal analysis of enzymatic activities associated with carbon metabolism in wild-type and mutant embryos of Arabidopsis using in situ histochemistry. Plant J 46: 155-169). The current invention describes the unexpected utility of a promoter sequence of a specific gene family member, At5g49190, to direct expression of heterologous ODP1 genes in a manner that allows for increased accumulation of oil during seed development of cruciferous oil seed without affecting germination and seedling establishment of the resulting seed. At5g49190 is expressed during seedling development in synchrony with accumulation of oil and protein (supra). Genes homologous to At5g49190 can be identified in other plant species based on sequence similarity to the At5g49190 gene product and expression pattern of the homolog during seed development. One skilled in the art will recognize that promoter sequences of these genes will have utility for expression of ODP1 genes for increased oil biosynthesis in cruciferous oil seed which is accompanied by unaltered seed germination and seedling establishment.

### Example 14

### Identification of Canola Promoters to Drive ODP1 Expression in Cruciferous Oilseed Plants

[0287] Public EST and genomic sequence collections of Canola were searched with the deduced amino acid sequence of At5g49190 (AtSUS2). Several ESTs and genomic sequences were identified and assembled into a single contiguous sequence that represents a transcript model of the canola homolog of At5g49190. The nucleotide and deduced amino acid sequence of the canola SUS2 homolog transcript model are set forth as SEQ ID NO:44 and SEQ ID NO:45, respectively.

[0288] Primers a (SEQ ID NO:46) b (SEQ ID NO:47) c (SEQ ID NO:48) and d (SEQ ID NO:49) were used in genome walking experiments according to manufacturer instructions (Clontech, Calif., USA). Briefly genomic DNA of Pioneer Hi-Bred International, Inc., spring canola variety NS1822BC was isolated using standard protocols and digested with PvuII or DraI. After adaptor ligation PCR PvuII and DraI-digested genomic DNA was used as template in PCR reactions with Primer a (SEQ ID:46) and Primer c (SEQ ID NO:48), respectively. PCR products generated with primers a (SEQ ID NO: 46) and c (SEQ ID NO:48) were amplified with primers b (SEQ ID NO:47) and d (SEQ ID NO:49), respectively. In both rounds of PCR experiments adaptor specific primers were used with primers a-d. Use of primers a and b generated PCR products of 2.1 kb. Primers c and d generated PCR products of 0.7 kb. These PCR products were cloned using the PCR blunt cloning system (Invitrogen, CA, USA) and sequenced.

[0289] SEQ ID NO:50 (PvuII rapa cons) is genomic sequence of canola variety NS1822BC that was generated with primers a and b. It is comprised of 312 bp of a canola SUS2 homolog and 1924 bp of sequence upstream of the inferred start codon of the SUS2 gene. This 1924 bp sequence (including the 5′ untranslated region) is designated the BnSUS2-2 promoter (SEQ ID NO:73).

[0290] SEQ ID NO:51 (1,6 DraI gene cons) is genomic sequence of canola variety NS1822BC that was generated with primers c and d. It is comprised of 37 bp of a canola SUS2 gene and 586 bp of sequence upstream of the inferred start codon of the SUS2 gene. This 586 bp sequence (including the 5′ untranslated region) is designated the BnSUS2-1 promoter (SEQ ID NO:72).

[0291] Plasmid DNA of clone #6 containing 1,6 DraI gene cons (SEQ ID NO:51) was used in a PCR reaction with primers SA188 (SEQ ID NO:52) and SA189 (SEQ ID NO:53) using PHUSION™ DNA polymerase (New England Biolabs, Inc.). Plasmid DNA of clone #45 containing PvuII rapa cons (SEQ ID NO:50) was used in a PCR reaction with primers SA190 (SEQ ID NO:54) and SA191 (SEQ ID NO:55). PCR products from both reactions were cloned into PCR blunt (Invitrogen, CA, USA) according to manufacturer instructions and sequenced. BN SUS2 prom1/PCR blunt is derived from 1,6 DraI gene cons (SEQ ID NO:51). It's sequence is set forth as SEQ ID NO:56. BN SUS2 prom2/PCR blunt is derived from PvuII rapa cons (SEQ ID NO:50). It's sequence is set forth as SEQ ID NO:57.

[0292] BN SUS2 prom1/PCR blunt (SEQ ID NO:56) was linearized with XbaI and NotI and ligated with a NotI-XbaI fragment from KS332 (SEQ ID NO:3) containing Phas terminator and Kti promoter DS red gene and Kti terminator cassette to give KS427 (SEQ ID NO:58). KS427 (SEQ ID NO:58) was linearized with NotI. A delta-6 desaturase gene of Mortierella alpina was excised from KS130 (SEQ ID NO:59) using NotI and ligated to NotI linearized KS427 (SEQ ID NO:58) to give KS432 (SEQ ID NO:60). Expression cassettes for DSred and delta-6 desaturase genes were excised as a single DNA fragment by digestion with AscI and inserted into AscI linearized pKR92 (SEQ ID NO:27) to give ARALO80 (SEQ ID NO:61). The ARALO80 vector contains the following expression unit: BnSUS2-1 promoter::M. alpina delta-6 desaturase::phaseolin terminator.

[0293] Prior to this KS130 (SEQ ID NO:59) was constructed as follows: Plasmid DNA of CGR-5, which is described in U.S. Pat. No. 5,968,809, was used in a PCR reaction with primers D6 fwd (SEQ ID NO:62) and D6 rev (SEQ ID NO:63). The PCR product was digested with NotI and ligated to NotI-linearized and de-phosphorylated KS119 vector (SEQ ID NO:64) to give KS130 (SEQ ID NO:59). Vector KS119 (SEQ ID NO:64) is described in International Publication No. WO2004071467.

[0294] The maize ODP1 gene was excised from KS336 (SEQ ID NO:6) using NotI and ligated to NotI linearized KS427 (SEQ ID NO:58) to give KS430 (SEQ ID NO:65). Expression cassettes for DSred and maize ODP1 genes were excised as a single fragment by digestion with AscI and inserted into AscI linearized pKR92 (SEQ ID NO:27) to give ARALO78 (SEQ ID NO:66). The ARALO78 vector contains the following expression unit: BnSUS2-1 promoter::ZM-ODP1::phaseolin terminator.

[0295] BN SUS2 pro2/PCR blunt (SEQ ID NO:57) was linearized with XbaI and NotI and ligated with a NotI-XbaI fragment from KS332 (SEQ ID NO:3) containing Phas terminator and Kti promoter DS red gene and Kti terminator cassette to give KS428 (SEQ ID NO:67). KS428 (SEQ ID NO:67) was linearized with NotI. The delta-6 desaturase gene was exised from KS130 (SEQ ID NO:59) using NotI and ligated to NotI-linearized KS428 (SEQ ID NO:67) to give KS429 (SEQ ID NO:68). Expression cassettes for DSred and delta-6 desaturase genes were excised as a single DNA fragment by digestion with AscI and inserted into AscI linearized pKR92 (SEQ ID NO:27) to give ARALO77 (SEQ ID NO:69). The ARALO77 vector contains the following expression unit: BnSUS2-2 promoter::M. alpina delta-6 desaturase::phaseolin terminator.

[0296] The maize ODP1 gene was excised from KS336 (SEQ ID NO:6) using NotI and ligated to NotI-linearized KS428 (SEQ ID NO:67) to give KS431 (SEQ ID NO:70). Expression cassettes for DSred and maize ODP1 genes were excised by digestion with AscI and inserted into AscI linearized pKR92 (SEQ ID NO:27 to give ARALO79 (SEQ ID NO:71). The ARALO79 vector contains the following expression unit: BnSUS2-2 promoter::ZM-ODP1::phaseolin terminator.

[0297] Plasmid DNA of ARALO77, ARALO78, ARALO79 and ARALO80 were used for Agrobacterium-mediated transformation of Arabidopsis plants as described in Example 2.

### Example 15

### Analysis of Progeny Seed of Arabidopsis Plants Transformed with Zea mays ODP Under Control of Canola Sucrose Synthase Promoters

[0298] Oil content of progeny seed (e.g., T2 seed) of transgenic lines generated with ARALO78 and ARALO79 can be measured by NMR as described in Example 2. Progeny seed (e.g., T2 seed) of transgenic events generated with ARALO78 and ARALO79 are expected to show increased oil content when compared to seed of untransformed control plants grown alongside the transgenic events.

What is claimed is:

1. A recombinant DNA construct comprising a polynucleotide encoding an ODP1 polypeptide operably linked to a sucrose synthase 2 promoter wherein said construct increases oil content in the seeds of a cruciferous oilseed plant while maintaining normal germination and further wherein the amino acid sequence of said ODP1 polypeptide has at least 80% sequence identity to a sequence selected from the group consisting of SEQ ID NO:37, SEQ ID NO:39, and SEQ ID NO:41.

2. The recombinant DNA construct of claim 1 wherein the amino acid sequence of said ODP1 polypeptide has at least 90% sequence identity.

3. The recombinant DNA construct of claim 1 wherein the amino acid sequence of said ODP1 polypeptide has at least 95% sequence identity.

4. The recombinant DNA construct of claim 1 wherein the amino acid sequence of said ODP1 polypeptide comprises a sequence selected from the group consisting of SEQ ID NO:37, SEQ ID NO:39 and SEQ ID NO:41.

5. The recombinant DNA construct of claim 1 wherein the sucrose synthase 2 promoter comprises:
(a) the nucleotide sequence of SEQ ID NO:43, SEQ ID NO:72 or SEQ ID NO:73; or
(b) a nucleotide sequence comprising a functional fragment of the nucleotide sequence of SEQ ID NO:43, SEQ ID NO:72 or SEQ ID NO:73.

6. The recombinant DNA construct of claim 1 wherein the oilseed plant is canola or Arabidopsis

7. A transgenic cruciferous oilseed plant comprising in its genome the recombinant DNA construct of claim 1.

8. The transgenic cruciferous oilseed plant of claim 7 wherein the cruciferous oilseed plant is selected from the group consisting of canola and Arabidopsis.

9. A transgenic seed obtained from the plant of claim 7 or claim 8, wherein said seed comprises in its genome the recombinant DNA construct of claim 1.

10. A method for producing a transgenic cruciferous oilseed plant comprising transforming a cruciferous oilseed plant cell with the recombinant DNA construct of claim 1 and regenerating a transgenic cruciferous oilseed plant from the transformed cruciferous oilseed plant cell, wherein the transgenic cruciferous oilseed plant comprises in its genome the recombinant DNA construct of claim 1.

11. The method of claim 10 wherein the cruciferous oilseed plant is selected from the group consisting of canola and Arabidopsis

12. A method for increasing oil content in seeds of a transgenic cruciferous oilseed plant while maintaining normal germination, said method comprising:
(a) transforming a cruciferous oilseed plant cell with a recombinant DNA construct comprising a polynucleotide encoding an ODP1 polypeptide, wherein the amino acid sequence of said ODP1 polypeptide has at least 80% sequence identity with a sequence selected from the group consisting of SEQ ID NO:37, SEQ ID NO:39, and SEQ ID NO:41, said sequence being operably linked to a seed specific promoter;
(b) regenerating a transgenic cruciferous oilseed plant from the transformed cell of step (a), wherein said plant comprises the recombinant DNA construct;
(c) obtaining a transgenic progeny plant derived from the transgenic cruciferous oilseed plant of step (b), wherein the transgenic progeny plant comprises in its genome the recombinant DNA construct;
(d) assaying the transgenic progeny plant obtained from step (c) for oil level and germination; and
(e) selecting those transgenic progeny plants having seeds with an increased level of oil and normal germination when compared to seeds obtained from a control cruciferous oilseed plant, wherein said control plant does not comprise the recombinant DNA construct.

13. The method of claim 12 wherein the ODP1 polypeptide is a maize ODP1 polypeptide.

14. The method of claim 13 wherein the amino acid sequence of the ODP1 polypeptide comprises the sequence of SEQ ID NO:37.

15. The method of claim 12 wherein the seed specific promoter is a sucrose synthase 2 promoter.

16. The method of claim 15 wherein the nucleotide sequence of sucrose synthase 2 promoter comprises:
(a) the nucleotide sequence of SEQ ID NO:43, SEQ ID NO:72 or SEQ ID NO:73; or
(b) a nucleotide sequence comprising a functional fragment of the nucleotide sequence of SEQ ID NO:43, SEQ ID NO:72 or SEQ ID NO:73.

17. The method of claim 12 wherein the cruciferous oilseed plant is canola or Arabidopsis.

18. Oil or by-products obtained from the seed of claim 9.

The application's sequence listing, which the Patent Office published only in electronic form, follows.

SEQUENCE LISTING (73 sequences)

SEQ ID NO: 1 - DNA, 5280 bp, Artificial Sequence
  vector pKS121/BS
  misc_feature (4090)..(4090): n is a, c, g, or t
ggccgccaccgcggtggagctccagcttttgttccctttagtgagggttaattgcgcgcttggcgtaatcatggtcatagctgtttcctgtgtgaaattgttatccgctcacaattccacacaacatacgagccggaagcataaagtgtaaagcctggggtgcctaatgagtgagctaactcacattaattgcgttgcgctcactgcccgctttccagtcgggaaacctgtcgtgccagctgcattaatgaatcggccaacgcgcggggagaggcggtttgcgtattgggcgctcttccgcttcctcgctcactgactcgctgcgctcggtcgttcggctgcggcgagcggtatcagctcactcaaaggcggtaatacggttatccacagaatcaggggataacgcaggaaagaacatgtgagcaaaaggccagcaaaaggccaggaaccgtaaaaaggccgcgttgctggcgtttttccataggctccgcccccctgacgagcatcacaaaaatcgacgctcaagtcagaggtggcgaaacccgacaggactataaagataccaggcgtttccccctggaagctccctcgtgcgctctcctgttccgaccctgccgcttaccggatacctgtccgcctttctcccttcgggaagcgtggcgctttctcatagctcacgctgtaggtatctcagttcggtgtaggtcgttcgctccaagctgggctgtgtgcacgaaccccccgttcagcccgaccgctgcgccttatccggtaactatcgtcttgagtccaacccggtaagacacgacttatcgccactggcagcagccactggtaacaggattagcagagcgaggtatgtaggcggtgctacagagttcttgaagtggtggcctaactacggctacactagaaggacagtatttggtatctgcgctctgctgaagccagttaccttcggaaaaagagttggtagctcttgatccggcaaacaaaccaccgctggtagcggtggtttttttgtttgcaagcagcagattacgcgcagaaaaaaaggatctcaagaagatcctttgatcttttctacggggtctgacgctcagtggaacgaaaactcacgttaagggattttggtcatgagattatcaaaaaggatcttcacctagatccttttaaattaaaaatgaagttttaaatcaatctaaagtatatatgagtaaacttggtctgacagttaccaatgcttaatcagtgaggcacctatctcagcgatctgtctatttcgttcatccatagttgcctgactccccgtcgtgtagataactacgatacgggagggcttaccatctggccccagtgctgcaatgataccgcgagacccacgctcaccggctccagatttatcagcaataaaccagccagccggaagggccgagcgcagaagtggtcctgcaactttatccgcctccatccagtctattaattgttgccgggaagctagagtaagtagttcgccagttaatagtttgcgcaacgttgttgccattgctacaggcatcgtggtgtcacgctcgtcgtttggtatggcttcattcagctccggttcccaacgatcaaggcgagttacatgatcccccatgttgtgcaaaaaagcggttagctccttcggtcctccgatcgttgtcagaagtaagttggccgcagtgttatcactcatggttatggcagcactgcataattctcttactgtcatgccatccgtaagatgcttttctgtgactggtgagtactcaaccaagtcattctgagaatagtgtatgcggcgaccgagttgctcttgcccggcgtcaatacgggataataccgcgccacatagcagaactttaaaagtgctcatcattggaaaacgttcttcggggcgaaaactctcaaggatcttaccgctgttgagatccagttcgatgtaacccactcgtgcacccaactgatcttcagcatcttttactttcaccagcgtttctgggtgagcaaaaacaggaaggcaaaatgccgcaaaaaagggaataagggcgacacggaaatgttgaatactcatactcttcctttttcaatattattgaagcatttatcagggttattgtctcatgagcggatacatatttgaatgtatttagaaaaataaacaaataggggttccgcgcacatttccccgaaaagtgccacctgacgcgccctgtagcggcgcattaagcgcggcgggtgtggtggttacgcgcagcgtgaccgctacacttgccagcgccctagcgcccgctcctttcgctttcttcccttcctttctcgccacgttcgccggctttccccgtcaagctctaaatcgggggctccctttagggttccgatttagtgctttacggcacctcgaccccaaaaaacttgattagggtgatggttcacgtagtgggccatcgccctgatagacggtttttcgccctttgacgttggagtccacgttctttaatagtggactcttgttccaaactggaacaacactcaaccctatctcggtctattcttttgatttataagggattttgccgatttcggcctattggttaaaaaatgagctgatttaacaaaaatttaacgcgaattttaacaaaatattaacgcttacaatttccattcgccattcaggctgcgcaactgttgggaagggcgatcggtgcgggcctcttcgctattacgccagctggcgaaagggggatgtgctgcaaggcgattaagttgggtaacgccagggttttcccagtcacgacgttgtaaaacgacggccagtgagcgcgcgtaatacgactcactatagggcgaattgggtaccgggccccccctcgaggtcgacggtatcgataagcttgatatcgaattcctgcagcccgggggatccactagttctagagcggcgcgccgtcgacggatataatgagccgtaaacaaagatgattaagtagtaattaatacgtactagtaaaagtggcaaaagataacgagaaagaaccaatttctttgcattcggccttagcggaaggcatatataagctttgattattttatttagtgtaatgatttcgtacaaccaaagcatttatttagtactctcacacttgtgtcgcggccgcttggggggctatggaagactttcttagttagttgtgtgaataagcaatgttgggagaatcgggactacttataggataggaataaaacagaaaagtattaagtgctaatgaaatatttagactgataattaaaatcttcacgtatgtccacttgatataaaaacgtcaggaataaaggaagtacagtagaatttaaaggtactctttttatatatacccgtgttctctttttggctagctagttgcataaaaaataatctatatttttatcattattttaaatatcttatgagatggtaaatatttatcataattttttttactattatttattatttgtgtgtgtaatacatatagaagttaattacaaattttatttactttttcattattttgatatgattcaccattaatttagtgttattatttataatagttcattttaatctttttgtatatattatgcgtgcagtacttttttcctacatataactactattacattttatttatataatatttttattaatgaattttcgtgataatatgtaatattgttcattattatttcagattttttaaaaatatttgtgttattatttatgaaatatgtaatttttttagtatttgattttatgatgataaagtgttctaaattcaaaagaagggggaaagcgtaaacattaaaaaacgtcatcaaacaaaaacaaaatcttgttaataaagataaaactgtttgttttgatcactgttatttcgtaatataaaaacattatttatatttatattgttgacaaccaaatttgcctatcaaatctaaccaatataatgcatgcgtggcaggtaatgtactaccatgaacttaagtcatgacataataaaccgtgaatctgaccaatgcatgtacctanctaaattgtatttgtgacacgaagcaaatgattcaattcacaatggagatgggaaacaaataatgaagaacccagaactaagaaagcttttctgaaaaataaaataaaggcaatgtcaaaagtatactgcatcatcagtccagaaagcacatgatatttttttatcagtatcaatgcagctagttttattttacaatatcgatatagctagtttaaatatattgcagctagatttataaatatttgtgttattatttatcatttgtgtaatcctgtttttagtattttagtttatatatgatgataatgtattccaaatttaaaagaagggaaataaatttaaacaagaaaaaaagtcatcaaacaaaaaacaaatgaaagggtggaaagatgttaccatgtaatgtgaatgttacagtatttcttttattatagagttaacaaattaactaatatgattttgttaataatgataaaatattttttttattattatttcataatataaaaatagtttacttaatataaaaaaaattctatcgttcacaacaaagttggccacctaatttaaccatgcatgtacccatggaccatattaggtaaccatcaaacctgatgaagagataaagagatgaagacttaagtcataacacaaaaccataaaaaacaaaaatacaatcaaccgtcaatctgaccaatgcatgaaaaagctgcaatagtgagtggcgacacaaagcacatgattttcttacaacggagataaaaccaaaaaaatatttcatgaacaacctagaacaaataaagcttttatataataaatatataaataaataaaggctatggaataatatacttcaatatatttggattaaataaattgttggcggggttgatatatttatacacacctaaagtcacttcaatctcattttcacttaacttttattttttttttctttttatttatcataaagagaatattgataatatactttttaacatatttttatgacattttttattggtgaaaacttattaaaaatcataaattttgtaagttagatttatttaaagagttcctcttcttattttaaattttttaataaatttttaaataactaaaatttgtgttaaaaatgttaaaaaagtgtgttattaacccttctcttcgaggatccaagcttggcgcg

SEQ ID NO: 2 - DNA, 5968 bp, Artificial Sequence
  vector pDsRedxKS121/BS;DNA
  misc_feature (5052)..(5052): n is a, c, g, or t
catggcctcctccgaggacgtcatcaaggagttcatgcgcttcaaggtgcgcatggagggctccgtgaacggccacgagttcgagatcgagggcgagggcgagggccgcccctacgagggcacccagaccgccaagctgaaggtgaccaagggcggccccctgcccttcgcctgggacatcctgtccccccagttccagtacggctccaaggtgtacgtgaagcaccccgccgacatccccgactacaagaagctgtccttccccgagggcttcaagtgggagcgcgtgatgaacttcgaggacggcggcgtggtgaccgtgacccaggactcctccctgcaggacggctccttcatctacaaggtgaagttcatcggcgtgaacttcccctccgacggccccgtaatgcagaagaagactatgggctgggaggcctccaccgagcgcctgtacccccgcgacggcgtgctgaagggcgagatccacaaggccctgaagctgaaggacggcggccactacctggtggagttcaagtccatctacatggccaagaagcccgtgcagctgcccggctactactacgtggactccaagctggacatcacctcccacaacgaggactacaccatcgtggagcagtacgagcgcgccgagggccgccaccacctgttcctgtagcggccggccgcgacacaagtgtgagagtactaaataaatgctttggttgtacgaaatcattacactaaataaaataatcaaagcttatatatgccttccgctaaggccgaatgcaaagaaattggttctttctcgttatcttttgccacttttactagtacgtattaattactacttaatcatctttgtttacggctcattatatccgtcgacggcgcgccgctctagaactagtggatcccccgggctgcaggaattcgatatcaagcttatcgataccgtcgacctcgagggggggcccggtacccaattcgccctatagtgagtcgtattacgcgcgctcactggccgtcgttttacaacgtcgtgactgggaaaaccctggcgttacccaacttaatcgccttgcagcacatccccctttcgccagctggcgtaatagcgaagaggcccgcaccgatcgcccttcccaacagttgcgcagcctgaatggcgaatggaaattgtaagcgttaatattttgttaaaattcgcgttaaatttttgttaaatcagctcattttttaaccaataggccgaaatcggcaaaatcccttataaatcaaaagaatagaccgagatagggttgagtgttgttccagtttggaacaagagtccactattaaagaacgtggactccaacgtcaaagggcgaaaaaccgtctatcagggcgatggcccactacgtgaaccatcaccctaatcaagttttttggggtcgaggtgccgtaaagcactaaatcggaaccctaaagggagcccccgatttagagcttgacggggaaagccggcgaacgtggcgagaaaggaagggaagaaagcgaaaggagcgggcgctagggcgctggcaagtgtagcggtcacgctgcgcgtaaccaccacacccgccgcgcttaatgcgccgctacagggcgcgtcaggtggcacttttcggggaaatgtgcgcggaacccctatttgtttatttttctaaatacattcaaatatgtatccgctcatgagacaataaccctgataaatgcttcaataatattgaaaaaggaagagtatgagtattcaacatttccgtgtcgcccttattcccttttttgcggcattttgccttcctgtttttgctcacccagaaacgctggtgaaagtaaaagatgctgaagatcagttgggtgcacgagtgggttacatcgaactggatctcaacagcggtaagatccttgagagttttcgccccgaagaacgttttccaatgatgagcacttttaaagttctgctatgtggcgcggtattatcccgtattgacgccgggcaagagcaactcggtcgccgcatacactattctcagaatgacttggttgagtactcaccagtcacagaaaagcatcttacggatggcatgacagtaagagaattatgcagtgctgccataaccatgagtgataacactgcggccaacttacttctgacaacgatcggaggaccgaaggagctaaccgcttttttgcacaacatgggggatcatgtaactcgccttgatcgttgggaaccggagctgaatgaagccataccaaacgacgagcgtgacaccacgatgcctgtagcaatggcaacaacgttgcgcaaactattaactggcgaactacttactctagcttcccggcaacaattaatagactggatggaggcggataaagttgcaggaccacttctgcgctcggcccttccggctggctggtttattgctgataaatctggagccggtgagcgtgggtctcgcggtatcattgcagcactggggccagatggtaagccctcccgtatcgtagttatctacacgacggggagtcaggcaactatggatgaacgaaatagacagatcgctgagataggtgcctcactgattaagcattggtaactgtcagaccaagtttactcatatatactttagattgatttaaaacttcatttttaatttaaaaggatctaggtgaagatcctttttgataatctcatgaccaaaatcccttaacgtgagttttcgttccactgagcgtcagaccccgtagaaaagatcaaaggatcttcttgagatcctttttttctgcgcgtaatctgctgcttgcaaacaaaaaaaccaccgctaccagcggtggtttgtttgccggatcaagagctaccaactctttttccgaaggtaactggcttcagcagagcgcagataccaaatactgtccttctagtgtagccgtagttaggccaccacttcaagaactctgtagcaccgcctacatacctcgctctgctaatcctgttaccagtggctgctgccagtggcgataagtcgtgtcttaccgggttggactcaagacgatagttaccggataaggcgcagcggtcgggctgaacggggggttcgtgcacacagcccagcttggagcgaacgacctacaccgaactgagatacctacagcgtgagctatgagaaagcgccacgcttcccgaagggagaaaggcggacaggtatccggtaagcggcagggtcggaacaggagagcgcacgagggagcttccagggggaaacgcctggtatctttatagtcctgtcgggtttcgccacctctgacttgagcgtcgatttttgtgatgctcgtcaggggggcggagcctatggaaaaacgccagcaacgcggcctttttacggttcctggccttttgctggccttttgctcacatgttctttcctgcgttatcccctgattctgtggataaccgtattaccgcctttgagtgagctgataccgctcgccgcagccgaacgaccgagcgcagcgagtcagtgagcgaggaagcggaagagcgcccaatacgcaaaccgcctctccccgcgcgttggccgattcattaatgcagctggcacgacaggtttcccgactggaaagcgggcagtgagcgcaacgcaattaatgtgagttagctcactcattaggcaccccaggctttacactttatgcttccggctcgtatgttgtgtggaattgtgagcggataacaatttcacacaggaaacagctatgaccatgattacgccaagcgcgcaattaaccctcactaaagggaacaaaagctggagctccaccgcggtggcggcccgcgccaagcttggatcctcgaagagaagggttaataacacacttttttaacatttttaacacaaattttagttatttaaaaatttattaaaaaatttaaaataagaagaggaactctttaaataaatctaacttacaaaatttatgatttttaataagttttcaccaataaaaaatgtcataaaaatatgttaaaaagtatattatcaatattctctttatgataaataaaaagaaaaaaaaaataaaagttaagtgaaaatgagattgaagtgactttaggtgtgtataaatatatcaaccccgccaacaatttatttaatccaaatatattgaagtatattattccatagcctttatttatttatatatttattatataaaagctttatttgttctaggttgttcatgaaatatttttttggttttatctccgttgtaagaaaatcatgtgctttgtgtcgccactcactattgcagctttttcatgcattggtcagattgacggttgattgtatttttgttttttatggttttgtgttatgacttaagtcttcatctctttatctcttcatcaggtttgatggttacctaatatggtccatgggtacatgcatggttaaattaggtggccaactttgttgtgaacgatagaattttttttatattaagtaaactatttttatattatgaaataataataaaaaaaatattttatcattattaacaaaatcatattagttaatttgttaactctataataaaagaaatactgtaacattcacattacatggtaacatctttccaccctttcatttgttttttgtttgatgactttttttcttgtttaaatttatttcccttcttttaaatttggaatacattatcatcatatataaactaaaatactaaaaacaggattacacaaatgataaataataacacaaatatttataaatctagctgcaatatatttaaactagctatatcgatattgtaaaataaaactagctgcattgatactgataaaaaaatatcatgtgctttctggactgatgatgcagtatacttttgacattgcctttattttatttttcagaaaagctttcttagttctgggttcttcattatttgtttcccatctccattgtgaattgaatcatttgcttcgtgtcacaaatacaatttagntaggtacatgcattggtcagattcacggtttattatgtcatgacttaagttcatggtagtacattacctgccacgcatgcattatattggttagatttgataggcaaatttggttgtcaacaatataaatataaataatgtttttatattacgaaataacagtgatcaaaacaaacagttttatctttattaacaagattttgtttttgtttgatgacgttttttaatgtttacgctttcccccttcttttgaatttagaacactttatcatcataaaatcaaatactaaaaaaattacatatttcataaataataacacaaatatttttaaaaaatctgaaataataatgaacaatattacatattatcacgaaaattcattaataaaaatattatataaataaaatgtaatagtagttatatgtaggaaaaaagtactgcacgcataatatatacaaaaagattaaaatgaactattataaataataacactaaattaatggtgaatcatatcaaaataatgaaaaagtaaataaaatttgtaattaacttctatatgtattacacacacaaataataaataatagtaaaaaaaattatgataaatatttaccatctcataagatatttaaaataatgataaaaatatagattattttttatgcaactagctagccaaaaagagaacacgggtatatataaaaagagtacctttaaattctactgtacttcctttattcctgacgtttttatatcaagtggacatacgtgaagattttaattatcagtctaaatatttcattagcacttaatacttttctgttttattcctatcctataagtagtcccgattctcccaacattgcttattcacacaactaactaagaaagtcttccatagccccccaagcggcc

SEQ ID NO: 3 - DNA, 10058 bp, Artificial Sequence
  vector pKS332
  misc_feature (1178)..(1178): n is a, c, g, or t
gatcctcgaagagaagggttaataacacacttttttaacatttttaacacaaattttagttatttaaaaatttattaaaaaatttaaaataagaagaggaactctttaaataaatctaacttacaaaatttatgatttttaataagttttcaccaataaaaaatgtcataaaaatatgttaaaaagtatattatcaatattctctttatgataaataaaaagaaaaaaaaaataaaagttaagtgaaaatgagattgaagtgactttaggtgtgtataaatatatcaaccccgccaacaatttatttaatccaaatatattgaagtatattattccatagcctttatttatttatatatttattatataaaagctttatttgttctaggttgttcatgaaatatttttttggttttatctccgttgtaagaaaatcatgtgctttgtgtcgccactcactattgcagctttttcatgcattggtcagattgacggttgattgtatttttgttttttatggttttgtgttatgacttaagtcttcatctctttatctcttcatcaggtttgatggttacctaatatggtccatgggtacatgcatggttaaattaggtggccaactttgttgtgaacgatagaattttttttatattaagtaaactatttttatattatgaaataataataaaaaaaatattttatcattattaacaaaatcatattagttaatttgttaactctataataaaagaaatactgtaacattcacattacatggtaacatctttccaccctttcatttgttttttgtttgatgactttttttcttgtttaaatttatttcccttcttttaaatttggaatacattatcatcatatataaactaaaatactaaaaacaggattacacaaatgataaataataacacaaatatttataaatctagctgcaatatatttaaactagctatatcgatattgtaaaataaaactagctgcattgatactgataaaaaaatatcatgtgctttctggactgatgatgcagtatacttttgacattgcctttattttatttttcagaaaagctttcttagttctgggttcttcattatttgtttcccatctccattgtgaattgaatcatttgcttcgtgtcacaaatacaatttagntaggtacatgcattggtcagattcacggtttattatgtcatgacttaagttcatggtagtacattacctgccacgcatgcattatattggttagatttgataggcaaatttggttgtcaacaatataaatataaataatgtttttatattacgaaataacagtgatcaaaacaaacagttttatctttattaacaagattttgtttttgtttgatgacgttttttaatgtttacgctttcccccttcttttgaatttagaacactttatcatcataaaatcaaatactaaaaaaattacatatttcataaataataacacaaatatttttaaaaaatctgaaataataatgaacaatattacatattatcacgaaaattcattaataaaaatattatataaataaaatgtaatagtagttatatgtaggaaaaaagtactgcacgcataatatatacaaaaagattaaaatgaactattataaataataacactaaattaatggtgaatcatatcaaaataatgaaaaagtaaataaaatttgtaattaacttctatatgtattacacacacaaataataaataatagtaaaaaaaattatgataaatatttaccatctcataagatatttaaaataatgataaaaatatagattattttttatgcaactagctagccaaaaagagaacacgggtatatataaaaagagtacctttaaattctactgtacttcctttattcctgacgtttttatatcaagtggacatacgtgaagattttaattatcagtctaaatatttcattagcacttaatacttttctgttttattcctatcctataagtagtcccgattctcccaacattgcttattcacacaactaactaagaaagtcttccatagccccccaagcggcccatggcctcctccgaggacgtcatcaaggagttcatgcgcttcaaggtgcgcatggagggctccgtgaacggccacgagttcgagatcgagggcgagggcgagggccgcccctacgagggcacccagaccgccaagctgaaggtgaccaagggcggccccctgcccttcgcctgggacatcctgtccccccagttccagtacggctccaaggtgtacgtgaagcaccccgccgacatccccgactacaagaagctgtccttccccgagggcttcaagtgggagcgcgtgatgaacttcgaggacggcggcgtggtgaccgtgacccaggactcctccctgcaggacggctccttcatctacaaggtgaagttcatcggcgtgaacttcccctccgacggccccgtaatgcagaagaagactatgggctgggaggcctccaccgagcgcctgtacccccgcgacggcgtgctgaagggcgagatccacaaggccctgaagctgaaggacggcggccactacctggtggagttcaagtccatctacatggccaagaagcccgtgcagctgcccggctactactacgtggactccaagctggacatcacctcccacaacgaggactacaccatcgtggagcagtacgagcgcgccgagggccgccaccacctgttcctgtagcggccggccgcgacacaagtgtgagagtactaaataaatgctttggttgtacgaaatcattacactaaataaaataatcaaagcttatatatgccttccgctaaggccgaatgcaaagaaattggttctttctcgttatcttttgccacttttactagtacgtattaattactacttaatcatctttgtttacggctcattatatccgtcgacggcgcgccgctctagaactagtggatccgtcgacggcgcgcccgatcatccggatatagttcctcctttcagcaaaaaacccctcaagacccgtttagaggccccaaggggttatgctagttattgctcagcggtggcagcagccaactcagcttcctttcgggctttgttagcagccggatcgatccaagctgtacctcactattcctttgccctcggacgagtgctggggcgtcggtttccactatcggcgagtacttctacacagccatcggtccagacggccgcgcttctgcgggcgatttgtgtacgcccgacagtcccggctccggatcggacgattgcgtcgcatcgaccctgcgcccaagctgcatcatcgaaattgccgtcaaccaagctctgatagagttggtcaagaccaatgcggagcatatacgcccggagccgcggcgatcctgcaagctccggatgcctccgctcgaagtagcgcgtctgctgctccatacaagccaaccacggcctccagaagaagatgttggcgacctcgtattgggaatccccgaacatcgcctcgctccagtcaatgaccgctgttatgcggccattgtccgtcaggacattgttggagccgaaatccgcgtgcacgaggtgccggacttcggggcagtcctcggcccaaagcatcagctcatcgagagcctgcgcgacggacgcactgacggtgtcgtccatcacagtttgccagtgatacacatggggatcagcaatcgcgcatatgaaatcacgccatgtagtgtattgaccgattccttgcggtccgaatgggccgaacccgctcgtctggctaagatcggccgcagcgatcgcatccatagcctccgcgaccggctgcagaacagcgggcagttcggtttcaggcaggtcttgcaacgtgacaccctgtgcacggcgggagatgcaataggtcaggctctcgctgaattccccaatgtcaagcacttccggaatcgggagcgcggccgatgcaaagtgccgataaacataacgatctttgtagaaaccatcggcgcagctatttacccgcaggacatatccacgccctcctacatcgaagctgaaagcacgagattcttcgccctccgagagctgcatcaggtcggagacgctgtcgaacttttcgatcagaaacttctcgacagacgtcgcggtgagttcaggcttttccatgggtatatctccttcttaaagttaaacaaaattatttctagagggaaaccgttgtggtctccctatagtgagtcgtattaatttcgcgggatcgagatcgatccaattccaatcccacaaaaatctgagcttaacagcacagttgctcctctcagagcagaatcgggtattcaacaccctcatatcaactactacgttgtgtataacggtccacatgccggtatatacgatgactggggttgtacaaaggcggcaacaaacggcgttcccggagttgcacacaagaaatttgccactattacagaggcaagagcagcagctgacgcgtacacaacaagtcagcaaacagacaggttgaacttcatccccaaaggagaagctcaactcaagcccaagagctttgctaaggccctaacaagcccaccaaagcaaaaagcccactggctcacgctaggaaccaaaaggcccagcagtgatccagccccaaaagagatctcctttgccccggagattacaatggacgatttcctctatctttacgatctaggaaggaagttcgaaggtgaaggtgacgacactatgttcaccactgataatgagaaggttagcctcttcaatttcagaaagaatgctgacccacagatggttagagaggcctacgcagcaggtctcatcaagacgatctacccgagtaacaatctccaggagatcaaataccttcccaagaaggttaaagatgcagtcaaaagattcaggactaattgcatcaagaacacagagaaagacatatttctcaagatcagaagtactattccagtatggacgattcaaggcttgcttcataaaccaaggcaagtaatagagattggagtctctaaaaaggtagttcctactgaatctaaggccatgcatggagtctaagattcaaatcgaggatctaacagaactcgccgtgaagactggcgaacagttcatacagagtcttttacgactcaatgacaagaagaaaatcttcgtcaacatggtggagcacgacactctggtctactccaaaaatgtcaaagatacagtctcagaagaccaaagggctattgagacttttcaacaaaggataatttcgggaaacctcctcggattccattgcccagctatctgtcacttcatcgaaaggacagtagaaaaggaaggtggctcctacaaatgccatcattgcgataaaggaaaggctatcattcaagatgcctctgccgacagtggtcccaaagatggacccccacccacgaggagcatcgtggaaaaagaagacgttccaaccacgtcttcaaagcaagtggattgatgtgacatctccactgacgtaagggatgacgcacaatcccactatccttcgcaagacccttcctctatataaggaagttcatttcatttggagaggacacgctcgagctcatttctctattacttcagccataacaaaagaactcttttctcttcttattaaaccatgaaaaagcctgaactcaccgcgacgtctgtcgagaagtttctgatcgaaaagttcgacagcgtctccgacctgatgcagctctcggagggcgaagaatctcgtgctttcagcttcgatgtaggagggcgtggatatgtcctgcgggtaaatagctgcgccgatggtttctacaaagatcgttatgtttatcggcactttgcatcggccgcgctcccgattccggaagtgcttgacattggggaattcagcgagagcctgacctattgcatctcccgccgtgcacagggtgtcacgttgcaagacctgcctgaaaccgaactgcccgctgttctgcagccggtcgcggaggccatggatgcgatcgctgcggccgatcttagccagacgagcgggttcggcccattcggaccgcaaggaatcggtcaatacactacatggcgtgatttcatatgcgcgattgctgatccccatgtgtatcactggcaaactgtgatggacgacaccgtcagtgcgtccgtcgcgcaggctctcgatgagctgatgctttgggccgaggactgccccgaagtccggcacctcgtgcacgcggatttcggctccaacaatgtcctgacggacaatggccgcataacagcggtcattgactggagcgaggcgatgttcggggattcccaatacgaggtcgccaacatcttcttctggaggccgtggttggcttgtatggagcagcagacgcgctacttcgagcggaggcatccggagcttgcaggatcgccgcggctccgggcgtatatgctccgcattggtcttgaccaactctatcagagcttggttgacggcaatttcgatgatgcagcttgggcgcagggtcgatgcgacgcaatcgtccgatccggagccgggactgtcgggcgtacacaaatcgcccgcagaagcgcggccgtctggaccgatggctgtgtagaagtactcgccgatagtggaaaccgacgccccagcactcgtccgagggcaaaggaatagtgaggtacctaaagaaggagtgcgtcgaagcagatcgttcaaacatttggcaataaagtttcttaagattgaatcctgttgccggtcttgcgatgattatcatataatttctgttgaattacgttaagcatgtaataattaacatgtaatgcatgacgttatttatgagatgggtttttatgattagagtcccgcaattatacatttaatacgcgatagaaaacaaaatatagcgcgcaaactaggataaattatcgcgcgcggtgtcatctatgttactagatcgatgtcgaatctgatcaacctgcattaatgaatcggccaacgcgcggggagaggcggtttgcgtattgggcgctcttccgcttcctcgctcactgactcgctgcgctcggtcgttcggctgcggcgagcggtatcagctcactcaaaggcggtaatacggttatccacagaatcaggggataacgcaggaaagaacatgtgagcaaaaggccagcaaaaggccaggaaccgtaaaaaggccgcgttgctggcgtttttccataggctccgcccccctgacgagcatcacaaaaatcgacgctcaagtcagaggtggcgaaacccgacaggactataaagataccaggcgtttccccctggaagctccctcgtgcgctctcctgttccgaccctgccgcttaccggatacctgtccgcctttctcccttcgggaagcgtggcgctttctcaatgctcacgctgtaggtatctcagttcggtgtaggtcgttcgctccaagctgggctgtgtgcacgaaccccccgttcagcccgaccgctgcgccttatccggtaactatcgtcttgagtccaacccggtaagacacgacttatcgccactggcagcagccactggtaacaggattagcagagcgaggtatgtaggcggtgctacagagttcttgaagtggtggcctaactacggctacactagaaggacagtatttggtatctgcgctctgctgaagccagttaccttcggaaaaagagttggtagctcttgatccggcaaacaaaccaccgctggtagcggtggtttttttgtttgcaagcagcagattacgcgcagaaaaaaaggatctcaagaagatcctttgatcttttctacggggtctgacgctcagtggaacgaaaactcacgttaagggattttggtcatgacattaacctataaaaataggcgtatcacgaggccctttcgtctcgcgcgtttcggtgatgacggtgaaaacctctgacacatgcagctcccggagacggtcacagcttgtctgtaagcggatgccgggagcagacaagcccgtcagggcgcgtcagcgggtgttggcgggtgtcggggctggcttaactatgcggcatcagagcagattgtactgagagtgcaccatatggacatattgtcgttagaacgcggctacaattaatacataaccttatgtatcatacacatacgatttaggtgacactatagaacggcgcgccaagcttttgatccatgcccttcatttgccgcttattaattaatttggtaacagtccgtactaatcagttacttatccttcccccatcataattaatcttggtagtctcgaatgccacaacactgactagtctcttggatcataagaaaaagccaaggaacaaaagaagacaaaacacaatgagagtatcctttgcatagcaatgtctaagttcataaaattcaaacaaaaacgcaatcacacacagtggacatcacttatccactagctgatcaggatcgccgcgtcaagaaaaaaaaactggaccccaaaagccatgcacaacaacacgtactcacaaaggtgtcaatcgagcagcccaaaacattcaccaactcaacccatcatgagccctcacatttgttgtttctaacccaacctcaaactcgtattctcttccgccacctcatttttgtttatttcaacacccgtcaaactgcatgccaccccgtggccaaatgtccatgcatgttaacaagacctatgactataaatagctgcaatctcggcccaggttttcatcatcaagaaccagttcaatatcctagtacaccgtattaaagaatttaagatatactgcggccgcaagtatgaactaaaatgcatgtaggtgtaagagctcatggagagcatggaatattgtatccgaccatgtaacagtataataactgagctccatctcacttcttctatgaataaacaaaggatgttatgatatattaacactctatctatgcaccttattgttctatgataaatttcctcttattattataaatcatctgaatcgtgacggcttatggaatgcttcaaatagtacaaaaacaaatgtgtactataagactttctaaacaattctaaccttagcattgtgaacgagacataagtgttaagaagacataacaattataatggaagaagtttgtctccatttatatattatatattacccacttatgtattatattaggatgttaaggagacataacaattataaagagagaagtttgtatccatttatatattatatactacccatttatatattatacttatccacttatttaatgtctttataaggtttgatccatgatatttctaatattttagttgatatgtatatgaaagggtactatttgaactctcttactctgtataaaggttggatcatccttaaagtgggtctatttaattttattgcttcttacagataaaaaaaaaattatgagttggtttgataaaatattgaaggatttaaaataataataaataacatataatatatgtatataaatttattataatataacatttatctataaaaaagtaaatattgtcataaatctatacaatcgtttagccttgctggacgaatctcaattatttaaacgagagtaaacatatttgactttttggttatttaacaaattattatttaacactatatgaaatttttttttttatcagcaaagaataaaattaaattaagaaggacaatggtgtcccaatccttatacaaccaacttccacaagaaagtcaagtcagagacaacaaaaaaacaagcaaaggaaattttttaatttgagttgtcttgtttgctgcataatttatgcagtaaaacactacacataacccttttagcagtagagcaatggttgaccgtgtgcttagcttcttttattttatttttttatcagcaaagaataaataaaataaaatgagacacttcagggatgtttcaacaagcttg

SEQ ID NO: 4 - DNA, 34 bp, Artificial Sequence
  PCR primer MWG345
gaattcgcggccgcatggagagatctcaacggca

SEQ ID NO: 5 - DNA, 34 bp, Artificial Sequence
  PCR primer MWG346
gaattcgcggccgcttagttgcacacactgatca

SEQ ID NO: 6 - DNA, 11251 bp, Artificial Sequence
  vector pKS336
  misc_feature (3542)..(3542): n is a, c, g, or t
ggccgcatggagagatctcaacggcagtctcctccgccaccgtcgccgtcctcctcctcgtcctccgtctccgcggacaccgtcctcgtccctcccggaaagaggcggagggcggcgacggccaaggccggcgccgagcctaataagaggatccgcaaggaccccgccgccgccgccgcggggaagaggagctccgtctacaggggagtcaccaggcacaggtggacgggcaggttcgaggcgcatctctgggacaagcactgcctcgccgcgctccacaacaagaagaaaggcaggcaagtctacctgggggcgtatgacagcgaggaggcagctgctcgtgcctatgacctcgcagctctcaagtactggggtcctgagactctgctcaacttccctgtggaggattactccagcgagatgccggagatggaggccgtgtcccgggaggagtacctggcctccctccgccgcaggagcagcggcttctccaggggcgtctccaagtacagaggcgtcgccaggcatcaccacaacgggaggtgggaggcacggattgggcgagtctttgggaacaagtacctctacttgggaacatttgacactcaagaagaggcagccaaggcctatgaccttgcggccattgaataccgtggcgtcaatgctgtaaccaacttcgacatcagctgctacctggaccacccgctgttcctggcacagctccaacaggagccacaggtggtgccggcactcaaccaagaacctcaacctgatcagagcgaaaccggaactacagagcaagagccggagtcaagcgaagccaagacaccggatggcagtgcagaacccgatgagaacgcggtgcctgacgacaccgcggagcccctcaccacagtcgacgacagcatcgaagagggcttgtggagcccttgcatggattacgagctagacaccatgtcgagaccaaactttggcagctcaatcaatctgagcgagtggttcgctgacgcagacttcgactgcaacatcggatgcctgttcgatgggtgttctgcggctgacgaaggaagcaaggatggtgtaggtctggcagatttcagtctgtttgaggcaggtgatgtccagctgaaggatgttctttcggatatggaagaggggatacaacctccagcgatgatcagtgtgtgcaacgcggccgcaagtatgaactaaaatgcatgtaggtgtaagagctcatggagagcatggaatattgtatccgaccatgtaacagtataataactgagctccatctcacttcttctatgaataaacaaaggatgttatgatatattaacactctatctatgcaccttattgttctatgataaatttcctcttattattataaatcatctgaatcgtgacggcttatggaatgcttcaaatagtacaaaaacaaatgtgtactataagactttctaaacaattctaaccttagcattgtgaacgagacataagtgttaagaagacataacaattataatggaagaagtttgtctccatttatatattatatattacccacttatgtattatattaggatgttaaggagacataacaattataaagagagaagtttgtatccatttatatattatatactacccatttatatattatacttatccacttatttaatgtctttataaggtttgatccatgatatttctaatattttagttgatatgtatatgaaagggtactatttgaactctcttactctgtataaaggttggatcatccttaaagtgggtctatttaattttattgcttcttacagataaaaaaaaaattatgagttggtttgataaaatattgaaggatttaaaataataataaataacatataatatatgtatataaatttattataatataacatttatctataaaaaagtaaatattgtcataaatctatacaatcgtttagccttgctggacgaatctcaattatttaaacgagagtaaacatatttgactttttggttatttaacaaattattatttaacactatatgaaatttttttttttatcagcaaagaataaaattaaattaagaaggacaatggtgtcccaatccttatacaaccaacttccacaagaaagtcaagtcagagacaacaaaaaaacaagcaaaggaaattttttaatttgagttgtcttgtttgctgcataatttatgcagtaaaacactacacataacccttttagcagtagagcaatggttgaccgtgtgcttagcttcttttattttatttttttatcagcaaagaataaataaaataaaatgagacacttcagggatgtttcaacaagcttggatcctcgaagagaagggttaataacacacttttttaacatttttaacacaaattttagttatttaaaaatttattaaaaaatttaaaataagaagaggaactctttaaataaatctaacttacaaaatttatgatttttaataagttttcaccaataaaaaatgtcataaaaatatgttaaaaagtatattatcaatattctctttatgataaataaaaagaaaaaaaaaataaaagttaagtgaaaatgagattgaagtgactttaggtgtgtataaatatatcaaccccgccaacaatttatttaatccaaatatattgaagtatattattccatagcctttatttatttatatatttattatataaaagctttatttgttctaggttgttcatgaaatatttttttggttttatctccgttgtaagaaaatcatgtgctttgtgtcgccactcactattgcagctttttcatgcattggtcagattgacggttgattgtatttttgttttttatggttttgtgttatgacttaagtcttcatctctttatctcttcatcaggtttgatggttacctaatatggtccatgggtacatgcatggttaaattaggtggccaactttgttgtgaacgatagaattttttttatattaagtaaactatttttatattatgaaataataataaaaaaaatattttatcattattaacaaaatcatattagttaatttgttaactctataataaaagaaatactgtaacattcacattacatggtaacatctttccaccctttcatttgttttttgtttgatgactttttttcttgtttaaatttatttcccttcttttaaatttggaatacattatcatcatatataaactaaaatactaaaaacaggattacacaaatgataaataataacacaaatatttataaatctagctgcaatatatttaaactagctatatcgatattgtaaaataaaactagctgcattgatactgataaaaaaatatcatgtgctttctggactgatgatgcagtatacttttgacattgcctttattttatttttcagaaaagctttcttagttctgggttcttcattatttgtttcccatctccattgtgaattgaatcatttgcttcgtgtcacaaatacaatttagntaggtacatgcattggtcagattcacggtttattatgtcatgacttaagttcatggtagtacattacctgccacgcatgcattatattggttagatttgataggcaaatttggttgtcaacaatataaatataaataatgtttttatattacgaaataacagtgatcaaaacaaacagttttatctttattaacaagattttgtttttgtttgatgacgttttttaatgtttacgctttcccccttcttttgaatttagaacactttatcatcataaaatcaaatactaaaaaaattacatatttcataaataataacacaaatatttttaaaaaatctgaaataataatgaacaatattacatattatcacgaaaattcattaataaaaatattatataaataaaatgtaatagtagttatatgtaggaaaaaagtactgcacgcataatatatacaaaaagattaaaatgaactattataaataataacactaaattaatggtgaatcatatcaaaataatgaaaaagtaaataaaatttgtaattaacttctatatgtattacacacacaaataataaataatagtaaaaaaaattatgataaatatttaccatctcataagatatttaaaataatgataaaaatatagattattttttatgcaactagctagccaaaaagagaacacgggtatatataaaaagagtacctttaaattctactgtacttcctttattcctgacgtttttatatcaagtggacatacgtgaagattttaattatcagtctaaatatttcattagcacttaatacttttctgttttattcctatcctataagtagtcccgattctcccaacattgcttattcacacaactaactaagaaagtcttccatagccccccaagcggcccatggcctcctccgaggacgtcatcaaggagttcatgcgcttcaaggtgcgcatggagggctccgtgaacggccacgagttcgagatcgagggcgagggcgagggccgcccctacgagggcacccagaccgccaagctgaaggtgaccaagggcggccccctgcccttcgcctgggacatcctgtccccccagttccagtacggctccaaggtgtacgtgaagcaccccgccgacatccccgactacaagaagctgtccttccccgagggcttcaagtgggagcgcgtgatgaacttcgaggacggcggcgtggtgaccgtgacccaggactcctccctgcaggacggctccttcatctacaaggtgaagttcatcggcgtgaacttcccctccgacggccccgtaatgcagaagaagactatgggctgggaggcctccaccgagcgcctgtacccccgcgacggcgtgctgaagggcgagatccacaaggccctgaagctgaaggacggcggccactacctggtggagttcaagtccatctacatggccaagaagcccgtgcagctgcccggctactactacgtggactccaagctggacatcacctcccacaacgaggactacaccatcgtggagcagtacgagcgcgccgagggccgccaccacctgttcctgtagcggccggccgcgacacaagtgtgagagtactaaataaatgctttggttgtacgaaatcattacactaaataaaataatcaaagcttatatatgccttccgctaaggccgaatgcaaagaaattggttctttctcgttatcttttgccacttttactagtacgtattaattactacttaatcatctttgtttacggctcattatatccgtcgacggcgcgccgctctagaactagtggatccgtcgacggcgcgcccgatcatccggatatagttcctcctttcagcaaaaaacccctcaagacccgtttagaggccccaaggggttatgctagttattgctcagcggtggcagcagccaactcagcttcctttcgggctttgttagcagccggatcgatccaagctgtacctcactattcctttgccctcggacgagtgctggggcgtcggtttccactatcggcgagtacttctacacagccatcggtccagacggccgcgcttctgcgggcgatttgtgtacgcccgacagtcccggctccggatcggacgattgcgtcgcatcgaccctgcgcccaagctgcatcatcgaaattgccgtcaaccaagctctgatagagttggtcaagaccaatgcggagcatatacgcccggagccgcggcgatcctgcaagctccggatgcctccgctcgaagtagcgcgtctgctgctccatacaagccaaccacggcctccagaagaagatgttggcgacctcgtattgggaatccccgaacatcgcctcgctccagtcaatgaccgctgttatgcggccattgtccgtcaggacattgttggagccgaaatccgcgtgcacgaggtgccggacttcggggcagtcctcggcccaaagcatcagctcatcgagagcctgcgcgacggacgcactgacggtgtcgtccatcacagtttgccagtgatacacatggggatcagcaatcgcgcatatgaaatcacgccatgtagtgtattgaccgattccttgcggtccgaatgggccgaacccgctcgtctggctaagatcggccgcagcgatcgcatccatagcctccgcgaccggctgcagaacagcgggcagttcggtttcaggcaggtcttgcaacgtgacaccctgtgcacggcgggagatgcaataggtcaggctctcgctgaattccccaatgtcaagcacttccggaatcgggagcgcggccgatgcaaagtgccgataaacataacgatctttgtagaaaccatcggcgcagctatttacccgcaggacatatccacgccctcctacatcgaagctgaaagcacgagattcttcgccctccgagagctgcatcaggtcggagacgctgtcgaacttttcgatcagaaacttctcgacagacgtcgcggtgagttcaggcttttccatgggtatatctccttcttaaagttaaacaaaattatttctagagggaaaccgttgtggtctccctatagtgagtcgtattaatttcgcgggatcgagatcgatccaattccaatcccacaaaaatctgagcttaacagcacagttgctcctctcagagcagaatcgggtattcaacaccctcatatcaactactacgttgtgtataacggtccacatgccggtatatacgatgactggggttgtacaaaggcggcaacaaacggcgttcccggagttgcacacaagaaatttgccactattacagaggcaagagcagcagctgacgcgtacacaacaagtcagcaaacagacaggttgaacttcatccccaaaggagaagctcaactcaagcccaagagctttgctaaggccctaacaagcccaccaaagcaaaaagcccactggctcacgctaggaaccaaaaggcccagcagtgatccagccccaaaagagatctcctttgccccggagattacaatggacgatttcctctatctttacgatctaggaaggaagttcgaaggtgaaggtgacgacactatgttcaccactgataatgagaaggttagcctcttcaatttcagaaagaatgctgacccacagatggttagagaggcctacgcagcaggtctcatcaagacgatctacccgagtaacaatctccaggagatcaaataccttcccaagaaggttaaagatgcagtcaaaagattcaggactaattgcatcaagaacacagagaaagacatatttctcaagatcagaagtactattccagtatggacgattcaaggcttgcttcataaaccaaggcaagtaatagagattggagtctctaaaaaggtagttcctactgaatctaaggccatgcatggagtctaagattcaaatcgaggatctaacagaactcgccgtgaagactggcgaacagttcatacagagtcttttacgactcaatgacaagaagaaaatcttcgtcaacatggtggagcacgacactctggtctactccaaaaatgtcaaagatacagtctcagaagaccaaagggctattgagacttttcaacaaaggataatttcgggaaacctcctcggattccattgcccagctatctgtcacttcatcgaaaggacagtagaaaaggaaggtggctcctacaaatgccatcattgcgataaaggaaaggctatcattcaagatgcctctgccgacagtggtcccaaagatggacccccacccacgaggagcatcgtggaaaaagaagacgttccaaccacgtcttcaaagcaagtggattgatgtgacatctccactgacgtaagggatgacgcacaatcccactatccttcgcaagacccttcctctatataaggaagttcatttcatttggagaggacacgctcgagctcatttctctattacttcagccataacaaaagaactcttttctcttcttattaaaccatgaaaaagcctgaactcaccgcgacgtctgtcgagaagtttctgatcgaaaagttcgacagcgtctccgacctgatgcagctctcggagggcgaagaatctcgtgctttcagcttcgatgtaggagggcgtggatatgtcctgcgggtaaatagctgcgccgatggtttctacaaagatcgttatgtttatcggcactttgcatcggccgcgctcccgattccggaagtgcttgacattggggaattcagcgagagcctgacctattgcatctcccgccgtgcacagggtgtcacgttgcaagacctgcctgaaaccgaactgcccgctgttctgcagccggtcgcggaggccatggatgcgatcgctgcggccgatcttagccagacgagcgggttcggcccattcggaccgcaaggaatcggtcaatacactacatggcgtgatttcatatgcgcgattgctgatccccatgtgtatcactggcaaactgtgatggacgacaccgtcagtgcgtccgtcgcgcaggctctcgatgagctgatgctttgggccgaggactgccccgaagtccggcacctcgtgcacgcggatttcggctccaacaatgtcctgacggacaatggccgcataacagcggtcattgactggagcgaggcgatgttcggggattcccaatacgaggtcgccaacatcttcttctggaggccgtggttggcttgtatggagcagcagacgcgctacttcgagcggaggcatccggagcttgcaggatcgccgcggctccgggcgtatatgctccgcattggtcttgaccaactctatcagagcttggttgacggcaatttcgatgatgcagcttgggcgcagggtcgatgcgacgcaatcgtccgatccggagccgggactgtcgggcgtacacaaatcgcccgcagaagcgcggccgtctggaccgatggctgtgtagaagtactcgccgatagtggaaaccgacgccccagcactcgtccgagggcaaaggaatagtgaggtacctaaagaaggagtgcgtcgaagcagatcgttcaaacatttggcaataaagtttcttaagattgaatcctgttgccggtcttgcgatgattatcatataatttctgttgaattacgttaagcatgtaataattaacatgtaatgcatgacgttatttatgagatgggtttttatgattagagtcccgcaattatacatttaatacgcgatagaaaacaaaatatagcgcgcaaactaggataaattatcgcgcgcggtgtcatctatgttactagatcgatgtcgaatctgatcaacctgcattaatgaatcggccaacgcgcggggagaggcggtttgcgtattgggcgctcttccgcttcctcgctcactgactcgctgcgctcggtcgttcggctgcggcgagcggtatcagctcactcaaaggcggtaatacggttatccacagaatcaggggataacgcaggaaagaacatgtgagcaaaaggccagcaaaaggccaggaaccgtaaaaaggccgcgttgctggcgtttttccataggctccgcccccctgacgagcatcacaaaaatcgacgctcaagtcagaggtggcgaaacccgacaggactataaagataccaggcgtttccccctggaagctccctcgtgcgctctcctgttccgaccctgccgcttaccggatacctgtccgcctttctcccttcgggaagcgtggcgctttctcaatgctcacgctgtaggtatctcagttcggtgtaggtcgttcgctccaagctgggctgtgtgcacgaaccccccgttcagcccgaccgctgcgccttatccggtaactatcgtcttgagtccaacccggtaagacacgacttatcgccactggcagcagccactggtaacaggattagcagagcgaggtatgtaggcggtgctacagagttcttgaagtggtggcctaactacggctacactagaaggacagtatttggtatctgcgctctgctgaagccagttaccttcggaaaaagagttggtagctcttgatccggcaaacaaaccaccgctggtagcggtggtttttttgtttgcaagcagcagattacgcgcagaaaaaaaggatctcaagaagatcctttgatcttttctacggggtctgacgctcagtggaacgaaaactcacgttaagggattttggtcatgacattaacctataaaaataggcgtatcacgaggccctttcgtctcgcgcgtttcggtgatgacggtgaaaacctctgacacatgcagctcccggagacggtcacagcttgtctgtaagcggatgccgggagcagacaagcccgtcagggcgcgtcagcgggtgttggcgggtgtcggggctggcttaactatgcggcatcagagcagattgtactgagagtgcaccatatggacatattgtcgttagaacgcggctacaattaatacataaccttatgtatcatacacatacgatttaggtgacactatagaacggcgcgccaagcttttgatccatgcccttcatttgccgcttattaattaatttggtaacagtccgtactaatcagttacttatccttcccccatcataattaatcttggtagtctcgaatgccacaacactgactagtctcttggatcataagaaaaagccaaggaacaaaagaagacaaaacacaatgagagtatcctttgcatagcaatgtctaagttcataaaattcaaacaaaaacgcaatcacacacagtggacatcacttatccactagctgatcaggatcgccgcgtcaagaaaaaaaaactggaccccaaaagccatgcacaacaacacgtactcacaaaggtgtcaatcgagcagcccaaaacattcaccaactcaacccatcatgagccctcacatttgttgtttctaacccaacctcaaactcgtattctcttccgccacctcatttttgtttatttcaacacccgtcaaactgcatgccaccccgtggccaaatgtccatgcatgttaacaagacctatgactataaatagctgcaatctcggcccaggttttcatcatcaagaaccagttcaatatcctagtacaccgtattaaagaatttaagatatactgc

SEQ ID NO: 7 - DNA, 9060 bp, Artificial Sequence
  T-DNA of vector pZBL120xKS336
  misc_feature (1856)..(1856): n is a, c, g, or t
aattacaacggtatatatcctgccgtcgactctagaggatccgcgccgtcgacggatataatgagccgtaaacaaagatgattaagtagtaattaatacgtactagtaaaagtggcaaaagataacgagaaagaaccaatttctttgcattcggccttagcggaaggcatatataagctttgattattttatttagtgtaatgatttcgtacaaccaaagcatttatttagtactctcacacttgtgtcgcggccggccgctacaggaacaggtggtggcggccctcggcgcgctcgtactgctccacgatggtgtagtcctcgttgtgggaggtgatgtccagcttggagtccacgtagtagtagccgggcagctgcacgggcttcttggccatgtagatggacttgaactccaccaggtagtggccgccgtccttcagcttcagggccttgtggatctcgcccttcagcacgccgtcgcgggggtacaggcgctcggtggaggcctcccagcccatagtcttcttctgcattacggggccgtcggaggggaagttcacgccgatgaacttcaccttgtagatgaaggagccgtcctgcagggaggagtcctgggtcacggtcaccacgccgccgtcctcgaagttcatcacgcgctcccacttgaagccctcggggaaggacagcttcttgtagtcggggatgtcggcggggtgcttcacgtacaccttggagccgtactggaactggggggacaggatgtcccaggcgaagggcagggggccgcccttggtcaccttcagcttggcggtctgggtgccctcgtaggggcggccctcgccctcgccctcgatctcgaactcgtggccgttcacggagccctccatgcgcaccttgaagcgcatgaactccttgatgacgtcctcggaggaggccatgggccgcttggggggctatggaagactttcttagttagttgtgtgaataagcaatgttgggagaatcgggactacttataggataggaataaaacagaaaagtattaagtgctaatgaaatatttagactgataattaaaatcttcacgtatgtccacttgatataaaaacgtcaggaataaaggaagtacagtagaatttaaaggtactctttttatatatacccgtgttctctttttggctagctagttgcataaaaaataatctatatttttatcattattttaaatatcttatgagatggtaaatatttatcataattttttttactattatttattatttgtgtgtgtaatacatatagaagttaattacaaattttatttactttttcattattttgatatgattcaccattaatttagtgttattatttataatagttcattttaatctttttgtatatattatgcgtgcagtacttttttcctacatataactactattacattttatttatataatatttttattaatgaattttcgtgataatatgtaatattgttcattattatttcagattttttaaaaatatttgtgttattatttatgaaatatgtaatttttttagtatttgattttatgatgataaagtgttctaaattcaaaagaagggggaaagcgtaaacattaaaaaacgtcatcaaacaaaaacaaaatcttgttaataaagataaaactgtttgttttgatcactgttatttcgtaatataaaaacattatttatatttatattgttgacaaccaaatttgcctatcaaatctaaccaatataatgcatgcgtggcaggtaatgtactaccatgaacttaagtcatgacataataaaccgtgaatctgaccaatgcatgtacctanctaaattgtatttgtgacacgaagcaaatgattcaattcacaatggagatgggaaacaaataatgaagaacccagaactaagaaagcttttctgaaaaataaaataaaggcaatgtcaaaagtatactgcatcatcagtccagaaagcacatgatatttttttatcagtatcaatgcagctagttttattttacaatatcgatatagctagtttaaatatattgcagctagatttataaatatttgtgttattatttatcatttgtgtaatcctgtttttagtattttagtttatatatgatgataatgtattccaaatttaaaagaagggaaataaatttaaacaagaaaaaaagtcatcaaacaaaaaacaaatgaaagggtggaaagatgttaccatgtaatgtgaatgttacagtatttcttttattatagagttaacaaattaactaatatgattttgttaataatgataaaatattttttttattattatttcataatataaaaatagtttacttaatataaaaaaaattctatcgttcacaacaaagttggccacctaatttaaccatgcatgtacccatggaccatattaggtaaccatcaaacctgatgaagagataaagagatgaagacttaagtcataacacaaaaccataaaaaacaaaaatacaatcaaccgtcaatctgaccaatgcatgaaaaagctgcaatagtgagtggcgacacaaagcacatgattttcttacaacggagataaaaccaaaaaaatatttcatgaacaacctagaacaaataaagcttttatataataaatatataaataaataaaggctatggaataatatacttcaatatatttggattaaataaattgttggcggggttgatatatttatacacacctaaagtcacttcaatctcattttcacttaacttttattttttttttctttttatttatcataaagagaatattgataatatactttttaacatatttttatgacattttttattggtgaaaacttattaaaaatcataaattttgtaagttagatttatttaaagagttcctcttcttattttaaattttttaataaatttttaaataactaaaatttgtgttaaaaatgttaaaaaagtgtgttattaacccttctcttcgaggatccaagcttgttgaaacatccctgaagtgtctcattttattttatttattctttgctgataaaaaaataaaataaaagaagctaagcacacggtcaaccattgctctactgctaaaagggttatgtgtagtgttttactgcataaattatgcagcaaacaagacaactcaaattaaaaaatttcctttgcttgtttttttgttgtctctgacttgactttcttgtggaagttggttgtataaggattgggacaccattgtccttcttaatttaattttattctttgctgataaaaaaaaaaatttcatatagtgttaaataataatttgttaaataaccaaaaagtcaaatatgtttactctcgtttaaataattgagattcgtccagcaaggctaaacgattgtatagatttatgacaatatttacttttttatagataaatgttatattataataaatttatatacatatattatatgttatttattattattttaaatccttcaatattttatcaaaccaactcataattttttttttatctgtaagaagcaataaaattaaatagacccactttaaggatgatccaacctttatacagagtaagagagttcaaatagtaccctttcatatacatatcaactaaaatattagaaatatcatggatcaaaccttataaagacattaaataagtggataagtataatatataaatgggtagtatataatatataaatggatacaaacttctctctttataattgttatgtctccttaacatcctaatataatacataagtgggtaatatataatatataaatggagacaaacttcttccattataattgttatgtcttcttaacacttatgtctcgttcacaatgctaaggttagaattgtttagaaagtcttatagtacacatttgtttttgtactatttgaagcattccataagccgtcacgattcagatgatttataataataagaggaaatttatcatagaacaataaggtgcatagatagagtgttaatatatcataacatcctttgtttattcatagaagaagtgagatggagctcagttattatactgttacatggtcggatacaatattccatgctctccatgagctcttacacctacatgcattttagttcatacttgcggccgcgttgcacacactgatcatcgctggaggttgtatcccctcttccatatccgaaagaacatccttcagctggacatcacctgcctcaaacagactgaaatctgccagacctacaccatccttgcttccttcgtcagccgcagaacacccatcgaacaggcatccgatgttgcagtcgaagtctgcgtcagcgaaccactcgctcagattgattgagctgccaaagtttggtctcgacatggtgtctagctcgtaatccatgcaagggctccacaagccctcttcgatgctgtcgtcgactgtggtgaggggctccgcggtgtcgtcaggcaccgcgttctcatcgggttctgcactgccatccggtgtcttggcttcgcttgactccggctcttgctctgtagttccggtttcgctctgatcaggttgaggttcttggttgagtgccggcaccacctgtggctcctgttggagctgtgccaggaacagcgggtggtccaggtagcagctgatgtcgaagttggttacagcattgacgccacggtattcaatggccgcaaggtcataggccttggctgcctcttcttgagtgtcaaatgttcccaagtagaggtacttgttcccaaagactcgcccaatccgtgcctcccacctcccgttgtggtgatgcctggcgacgcctctgtacttggagacgcccctggagaagccgctgctcctgcggcggagggaggccaggtactcctcccgggacacggcctccatctccggcatctcgctggagtaatcctccacagggaagttgagcagagtctcaggaccccagtacttgagagctgcgaggtcataggcacgagcagctgcctcctcgctgtcatacgcccccaggtagacttgcctgcctttcttcttgttgtggagcgcggcgaggcagtgcttgtcccagagatgcgcctcgaacctgcccgtccacctgtgcctggtgactcccctgtagacggagctcctcttccccgcggcggcggcggcggggtccttgcggatcctcttattaggctcggcgccggccttggccgtcgccgccctccgcctctttccgggagggacgaggacggtgtccgcggagacggaggacgaggaggaggacggcgacggtggcggaggagactgccgttgagatctctccatgcggccgcagtatatcttaaattctttaatacggtgtactaggatattgaactggttcttgatgatgaaaacctgggccgagattgcagctatttatagtcataggtcttgttaacatgcatggacatttggccacggggtggcatgcagtttgacgggtgttgaaataaacaaaaatgaggtggcggaagagaatacgagtttgaggttgggttagaaacaacaaatgtgagggctcatgatgggttgagttggtgaatgttttgggctgctcgattgacacctttgtgagtacgtgttgttgtgcatggcttttggggtccagtttttttttcttgacgcggcgatcctgatcagctagtggataagtgatgtccactgtgtgtgattgcgtttttgtttgaattttatgaacttagacattgctatgcaaaggatactctcattgtgttttgtcttcttttgttccttggctttttcttatgatccaagagactagtcagtgttgtggcattcgagactaccaagattaattatgatgggggaaggataagtaactgattagtacggactgttaccaaattaattaataagcggcaaatgaagggcatggatcaaaagcttggcgcgaattcactggccgtcgttttacaacgtcgtgactgggaaaaccctggcgttacccaacttaatcgccttgcagcacatccccctttcgccagctggcgtaatagcgaagaggcccgcaccgatcgcccttcccaacagttgcgcagcctgaatggcgaatggatcgatccgtcgatcgaccaaagcggccatcgtgcctccccactcctgcagttcgggggcatggatgcgcggatagccgctgctggtttcctggatgccgacggatttgcactgccggtagaactccgcgaggtcgtccagcctcaggcagcagctgaaccaactcgcgaggggatcgagcccctgctgagcctcgacatgttgtcgcaaaattcgccctggacccgcccaacgatttgtcgtcactgtcaaggtttgacctgcacttcatttggggcccacatacaccaaaaaaatgctgcataattctcggggcagcaagtcggttacccggccgccgtgctggaccgggttgaatggtgcccgtaactttcggtagagcggacggccaatactcaacttcaaggaatctcacccatgcgcgccggcggggaaccggagttcccttcagtgaacgttattagttcgccgctcggtgtgtcgtagatactagcccctggggccttttgaaatttgaataagatttatgtaatcagtcttttaggtttgaccggttctgccgctttttttaaaattggatttgtaataataaaacgcaattgtttgttattgtggcgctctatcatagatgtcgctataaacctattcagcacaatatattgttttcattttaatattgtacatataagtagtagggtacaatcagtaaattgaacggagaatattattcataaaaatacgatagtaacgggtgatatattcattagaatgaaccgaaaccggcggtaaggatctgagctacacatgctcaggttttttacaacgtgcacaacagaattgaaagcaaatatcatgcgatcataggcgtctcgcatatctcattaaagcagggggtgggcgaagaactccagcatgagatccccgcgctggaggatcatccagccggcgtcccggaaaacgattccgaagcccaacctttcatagaaggcggcggtggaatcgaaatctcgtgatggcaggttgggcgtcgcttggtcggtcatttcgaaccccagagtcccgctcagaagaactcgtcaagaaggcgatagaaggcgatgcgctgcgaatcgggagcggcgataccgtaaagcacgaggaagcggtcagcccattcgccgccaagctcttcagcaatatcacgggtagccaacgctatgtcctgatagcggtccgccacacccagccggccacagtcgatgaatccagaaaagcggccattttccaccatgatattcggcaagcaggcatcgccatgggtcacgacgagatcctcgccgtcgggcatgcgcgccttgagcctggcgaacagttcggctggcgcgagcccctgatgctcttcgtccagatcatcctgatcgacaagaccggcttccatccgagtacgtgctcgctcgatgcgatgtttcgcttggtggtcgaatgggcaggtagccggatcaagcgtatgcagccgccgcattgcatcagccatgatggatactttctcggcaggagcaaggtgagatgacaggagatcctgccccggcacttcgcccaatagcagccagtcccttcccgcttcagtgacaacgtcgagcacagctgcgcaaggaacgcccgtcgtggccagccacgatagccgcgctgcctcgtcctgcagttcattcagggcaccggacaggtcggtcttgacaaaaagaaccgggcgcccctgcgctgacagccggaacacggcggcatcagagcagccgattgtctgttgtgcccagtcatagccgaatagcctctccacccaagcggccggagaacctgcgtgcaatccatcttgttcaatcatgcgaaacgatccccgcaagcttggagactggtgatttcagcgtgtcctctccaaatgaaatgaacttccttatatagaggaagggtcttgcgaaggatagtgggattgtgcgtcatcccttacgtcagtggagatatcacatcaatccacttgctttgaagacgtggttggaacgtcttctttttccacgatgctcctcgtgggtgggggtccatctttgggaccactgtcggcagaggcatcttcaacgatggcctttcctttatcgcaatgatggcatttgtaggagccaccttccttttccactatcttcacaataaagtgacagatagctgggcaatggaatccgaggaggtttccggatattaccctttgttgaaaagtctcaattgccctttggtcttctgagactgtatctttgatatttttggagtagacaagcgtgtcgtgctccaccatgttgacgaagattttcttcttgtcattgagtcgtaagagactctgtatgaactgttcgccagtctttacggcgagttctgttaggtcctctatttgaatctttgactccatggcctttgattcagtgggaactacctttttagagactccaatctctattacttgccttggtttgtgaagcaagccttgaatcgtccatactggaatagtacttctgatcttgagaaatatatctttctctgtgttcttgatgcagttagtcctgaatcttttgactgcatctttaaccttcttgggaaggtatttgatctcctggagattattgctcgggtagatcgtcttgatgagacctgctgcgtaagcctctctaaccatctgtgggttagcattctttctgaaattgaaaaggctaatcttctcattatcagtggtgaacatggtatcgtcaccttctccgtcgaacttcctgactagatcgtagagatagaggaagtcgtccattgtgatctctggggcaaaggagatctgaattatcatttacaattgaatatatcctgcca

SEQ ID NO: 8 - DNA, 34 bp, Artificial Sequence
  PCR primer MWG339
gaattcgcggccgccatgagaaggtctccctctg

SEQ ID NO: 9 - DNA, 34 bp, Artificial Sequence
  PCR primer MWG340
gaattcgcggccgctcaaaccctaaattcacacg

SEQ ID NO: 10 - DNA, 11299 bp, Artificial Sequence
  vector pKS333
  misc_feature (3588)..(3588): n is a, c, g, or t
ggccgccatgagaaggtctccctctgtttctacttcctcctcctcctcctcctcctgcgtcggcggcggcggcttcgacagcaataatctcaatctcgccgcccctccgcgccggccgcaatcggagaagaccggagcgaaacgccggaagcggaatcaggacgacgccaaatgcgagattgagaatcgtaacggtaataacaacaacagcagcaacaacaatgcctcttccggccgccggagctccatttacagaggagtcactaggcaccgatggaccggccggttcgaagcgcatctctgggacaagagttcgtggaatagcattcagaacaaaaaaggaaggcaagtttatttgggagcatacgataacgaggaagctgccgcccgaacttatgacctcgctgccctcaagtactggggtcccggaaccaccctcaatttcccggtagagtcgtacaggaatgaaatagaagaaatgcggaaagttacgaaggaggagtatttggcgtcgttacggcggcggagcagcggattttcgagaggcgtatcgaagtaccgcggcgtggcccgccaccaccacaacggccggtgggaggcgcggatcggccgtgttttcggaagcaaatatctttacctgggaacttacaacacacaagaggaagcagcagcagcatatgacatggctgcaattgagtacagaggggtcaatgcagtgaccaatttcgacatcagcaattacattgggcggctggagaataaatcatcagtttttccagcagcagagcagcccctacagcccaactgctcccctgcttcctcttctgaggaaggcgaagtagtacagcagcaacagcaacagacgacgatggcgttctcaggctcgcccctccagttcccgtcgatggagaacagcccgacgacaatggaggaggatcatgatctgcattggtcattcctagacacggggttcgtgcaggtccccgacctccccctcgagaagtctggcgaattgcctgacctgttctttgatgagatcgggttcgaggacgacatcgggttgatattcgaggcgagcttggaagacgagaggtgcggggaggggggtgagaagttagaagatgtggggaaaatggagatgatgaagagtgatcatgaggagagggggttgttctcgactacttcgccatcttcgtcgtcgataaccacctcggtttcgtgtgaatttagggtttgagcggccgcaagtatgaactaaaatgcatgtaggtgtaagagctcatggagagcatggaatattgtatccgaccatgtaacagtataataactgagctccatctcacttcttctatgaataaacaaaggatgttatgatatattaacactctatctatgcaccttattgttctatgataaatttcctcttattattataaatcatctgaatcgtgacggcttatggaatgcttcaaatagtacaaaaacaaatgtgtactataagactttctaaacaattctaaccttagcattgtgaacgagacataagtgttaagaagacataacaattataatggaagaagtttgtctccatttatatattatatattacccacttatgtattatattaggatgttaaggagacataacaattataaagagagaagtttgtatccatttatatattatatactacccatttatatattatacttatccacttatttaatgtctttataaggtttgatccatgatatttctaatattttagttgatatgtatatgaaagggtactatttgaactctcttactctgtataaaggttggatcatccttaaagtgggtctatttaattttattgcttcttacagataaaaaaaaaattatgagttggtttgataaaatattgaaggatttaaaataataataaataacatataatatatgtatataaatttattataatataacatttatctataaaaaagtaaatattgtcataaatctatacaatcgtttagccttgctggacgaatctcaattatttaaacgagagtaaacatatttgactttttggttatttaacaaattattatttaacactatatgaaatttttttttttatcagcaaagaataaaattaaattaagaaggacaatggtgtcccaatccttatacaaccaacttccacaagaaagtcaagtcagagacaacaaaaaaacaagcaaaggaaattttttaatttgagttgtcttgtttgctgcataatttatgcagtaaaacactacacataacccttttagcagtagagcaatggttgaccgtgtgcttagcttcttttattttatttttttatcagcaaagaataaataaaataaaatgagacacttcagggatgtttcaacaagcttggatcctcgaagagaagggttaataacacacttttttaacatttttaacacaaattttagttatttaaaaatttattaaaaaatttaaaataagaagaggaactctttaaataaatctaacttacaaaatttatgatttttaataagttttcaccaataaaaaatgtcataaaaatatgttaaaaagtatattatcaatattctctttatgataaataaaaagaaaaaaaaaataaaagttaagtgaaaatgagattgaagtgactttaggtgtgtataaatatatcaaccccgccaacaatttatttaatccaaatatattgaagtatattattccatagcctttatttatttatatatttattatataaaagctttatttgttctaggttgttcatgaaatatttttttggttttatctccgttgtaagaaaatcatgtgctttgtgtcgccactcactattgcagctttttcatgcattggtcagattgacggttgattgtatttttgttttttatggttttgtgttatgacttaagtcttcatctctttatctcttcatcaggtttgatggttacctaatatggtccatgggtacatgcatggttaaattaggtggccaactttgttgtgaacgatagaattttttttatattaagtaaactatttttatattatgaaataataataaaaaaaatattttatcattattaacaaaatcatattagttaatttgttaactctataataaaagaaatactgtaacattcacattacatggtaacatctttccaccctttcatttgttttttgtttgatgactttttttcttgtttaaatttatttcccttcttttaaatttggaatacattatcatcatatataaactaaaatactaaaaacaggattacacaaatgataaataataacacaaatatttataaatctagctgcaatatatttaaactagctatatcgatattgtaaaataaaactagctgcattgatactgataaaaaaatatcatgtgctttctggactgatgatgcagtatacttttgacattgcctttattttatttttcagaaaagctttcttagttctgggttcttcattatttgtttcccatctccattgtgaattgaatcatttgcttcgtgtcacaaatacaatttagntaggtacatgcattggtcagattcacggtttattatgtcatgacttaagttcatggtagtacattacctgccacgcatgcattatattggttagatttgataggcaaatttggttgtcaacaatataaatataaataatgtttttatattacgaaataacagtgatcaaaacaaacagttttatctttattaacaagattttgtttttgtttgatgacgttttttaatgtttacgctttcccccttcttttgaatttagaacactttatcatcataaaatcaaatactaaaaaaattacatatttcataaataataacacaaatatttttaaaaaatctgaaataataatgaacaatattacatattatcacgaaaattcattaataaaaatattatataaataaaatgtaatagtagttatatgtaggaaaaaagtactgcacgcataatatatacaaaaagattaaaatgaactattataaataataacactaaattaatggtgaatcatatcaaaataatgaaaaagtaaataaaatttgtaattaacttctatatgtattacacacacaaataataaataatagtaaaaaaaattatgataaatatttaccatctcataagatatttaaaataatgataaaaatatagattattttttatgcaactagctagccaaaaagagaacacgggtatatataaaaagagtacctttaaattctactgtacttcctttattcctgacgtttttatatcaagtggacatacgtgaagattttaattatcagtctaaatatttcattagcacttaatacttttctgttttattcctatcctataagtagtcccgattctcccaacattgcttattcacacaactaactaagaaagtcttccatagccccccaagcggcccatggcctcctccgaggacgtcatcaaggagttcatgcgcttcaaggtgcgcatggagggctccgtgaacggccacgagttcgagatcgagggcgagggcgagggccgcccctacgagggcacccagaccgccaagctgaaggtgaccaagggcggccccctgcccttcgcctgggacatcctgtccccccagttccagtacggctccaaggtgtacgtgaagcaccccgccgacatccccgactacaagaagctgtccttccccgagggcttcaagtgggagcgcgtgatgaacttcgaggacggcggcgtggtgaccgtgacccaggactcctccctgcaggacggctccttcatctacaaggtgaagttcatcggcgtgaacttcccctccgacggccccgtaatgcagaagaagactatgggctgggaggcctccaccgagcgcctgtacccccgcgacggcgtgctgaagggcgagatccacaaggccctgaagctgaaggacggcggccactacctggtggagttcaagtccatctacatggccaagaagcccgtgcagctgcccggctactactacgtggactccaagctggacatcacctcccacaacgaggactacaccatcgtggagcagtacgagcgcgccgagggccgccaccacctgttcctgtagcggccggccgcgacacaagtgtgagagtactaaataaatgctttggttgtacgaaatcattacactaaataaaataatcaaagcttatatatgccttccgctaaggccgaatgcaaagaaattggttctttctcgttatcttttgccacttttactagtacgtattaattactacttaatcatctttgtttacggctcattatatccgtcgacggcgcgggccgctctagaactagtggatccgtcgacggcgcgcccgatcatccggatatagttcctcctttcagcaaaaaacccctcaagacccgtttagaggccccaaggggttatgctagttattgctcagcggtggcagcagccaactcagcttcctttcgggctttgttagcagccggatcgatccaagctgtacctcactattcctttgccctcggacgagtgctggggcgtcggtttccactatcggcgagtacttctacacagccatcggtccagacggccgcgcttctgcgggcgatttgtgtacgcccgacagtcccggctccggatcggacgattgcgtcgcatcgaccctgcgcccaagctgcatcatcgaaattgccgtcaaccaagctctgatagagttggtcaagaccaatgcggagcatatacgcccggagccgcggcgatcctgcaagctccggatgcctccgctcgaagtagcgcgtctgctgctccatacaagccaaccacggcctccagaagaagatgttggcgacctcgtattgggaatccccgaacatcgcctcgctccagtcaatgaccgctgttatgcggccattgtccgtcaggacattgttggagccgaaatccgcgtgcacgaggtgccggacttcggggcagtcctcggcccaaagcatcagctcatcgagagcctgcgcgacggacgcactgacggtgtcgtccatcacagtttgccagtgatacacatggggatcagcaatcgcgcatatgaaatcacgccatgtagtgtattgaccgattccttgcggtccgaatgggccgaacccgctcgtctggctaagatcggccgcagcgatcgcatccatagcctccgcgaccggctgcagaacagcgggcagttcggtttcaggcaggtcttgcaacgtgacaccctgtgcacggcgggagatgcaataggtcaggctctcgctgaattccccaatgtcaagcacttccggaatcgggagcgcggccgatgcaaagtgccgataaacataacgatctttgtagaaaccatcggcgcagctatttacccgcaggacatatccacgccctcctacatcgaagctgaaagcacgagattcttcgccctccgagagctgcatcaggtcggagacgctgtcgaacttttcgatcagaaacttctcgacagacgtcgcggtgagttcaggcttttccatgggtatatctccttcttaaagttaaacaaaattatttctagagggaaaccgttgtggtctccctatagtgagtcgtattaatttcgcgggatcgagatcgatccaattccaatcccacaaaaatctgagcttaacagcacagttgctcctctcagagcagaatcgggtattcaacaccctcatatcaactactacgttgtgtataacggtccacatgccggtatatacgatgactggggttgtacaaaggcggcaacaaacggcgttcccggagttgcacacaagaaatttgccactattacagaggcaagagcagcagctgacgcgtacacaacaagtcagcaaacagacaggttgaacttcatccccaaaggagaagctcaactcaagcccaagagctttgctaaggccctaacaagcccaccaaagcaaaaagcccactggctcacgctaggaaccaaaaggcccagcagtgatccagccccaaaagagatctcctttgccccggagattacaatggacgatttcctctatctttacgatctaggaaggaagttcgaaggtgaaggtgacgacactatgttcaccactgataatgagaaggttagcctcttcaatttcagaaagaatgctgacccacagatggttagagaggcctacgcagcaggtctcatcaagacgatctacccgagtaacaatctccaggagatcaaataccttcccaagaaggttaaagatgcagtcaaaagattcaggactaattgcatcaagaacacagagaaagacatatttctcaagatcagaagtactattccagtatggacgattcaaggcttgcttcataaaccaaggcaagtaatagagattggagtctctaaaaaggtagttcctactgaatctaaggccatgcatggagtctaagattcaaatcgaggatctaacagaactcgccgtgaagactggcgaacagttcatacagagtcttttacgactcaatgacaagaagaaaatcttcgtcaacatggtggagcacgacactctggtctactccaaaaatgtcaaagatacagtctcagaagaccaaagggctattgagacttttcaacaaaggataatttcgggaaacctcctcggattccattgcccagctatctgtcacttcatcgaaaggacagtagaaaaggaaggtggctcctacaaatgccatcattgcgataaaggaaaggctatcattcaagatgcctctgccgacagtggtcccaaagatggacccccacccacgaggagcatcgtggaaaaagaagacgttccaaccacgtcttcaaagcaagtggattgatgtgacatctccactgacgtaagggatgacgcacaatcccactatccttcgcaagacccttcctctatataaggaagttcatttcatttggagaggacacgctcgagctcatttctctattacttcagccataacaaaagaactcttttctcttcttattaaaccatgaaaaagcctgaactcaccgcgacgtctgtcgagaagtttctgatcgaaaagttcgacagcgtctccgacctgatgcagctctcggagggcgaagaatctcgtgctttcagcttcgatgtaggagggcgtggatatgtcctgcgggtaaatagctgcgccgatggtttctacaaagatcgttatgtttatcggcactttgcatcggccgcgctcccgattccggaagtgcttgacattggggaattcagcgagagcctgacctattgcatctcccgccgtgcacagggtgtcacgttgcaagacctgcctgaaaccgaactgcccgctgttctgcagccggtcgcggaggccatggatgcgatcgctgcggccgatcttagccagacgagcgggttcggcccattcggaccgcaaggaatcggtcaatacactacatggcgtgatttcatatgcgcgattgctgatccccatgtgtatcactggcaaactgtgatggacgacaccgtcagtgcgtccgtcgcgcaggctctcgatgagctgatgctttgggccgaggactgccccgaagtccggcacctcgtgcacgcggatttcggctccaacaatgtcctgacggacaatggccgcataacagcggtcattgactggagcgaggcgatgttcggggattcccaatacgaggtcgccaacatcttcttctggaggccgtggttggcttgtatggagcagcagacgcgctacttcgagcggaggcatccggagcttgcaggatcgccgcggctccgggcgtatatgctccgcattggtcttgaccaactctatcagagcttggttgacggcaatttcgatgatgcagcttgggcgcagggtcgatgcgacgcaatcgtccgatccggagccgggactgtcgggcgtacacaaatcgcccgcagaagcgcggccgtctggaccgatggctgtgtagaagtactcgccgatagtggaaaccgacgccccagcactcgtccgagggcaaaggaatagtgaggtacctaaagaaggagtgcgtcgaagcagatcgttcaaacatttggcaataaagtttcttaagattgaatcctgttgccggtcttgcgatgattatcatataatttctgttgaattacgttaagcatgtaataattaacatgtaatgcatgacgttatttatgagatgggtttttatgattagagtcccgcaattatacatttaatacgcgatagaaaacaaaatatagcgcgcaaactaggataaattatcgcgcgcggtgtcatctatgttactagatcgatgtcgaatctgatcaacctgcattaatgaatcggccaacgcgcggggagaggcggtttgcgtattgggcgctcttccgcttcctcgctcactgactcgctgcgctcggtcgttcggctgcggcgagcggtatcagctcactcaaaggcggtaatacggttatccacagaatcaggggataacgcaggaaagaacatgtgagcaaaaggccagcaaaaggccaggaaccgtaaaaaggccgcgttgctggcgtttttccataggctccgcccccctgacgagcatcacaaaaatcgacgctcaagtcagaggtggcgaaacccgacaggactataaagataccaggcgtttccccctggaagctccctcgtgcgctctcctgttccgaccctgccgcttaccggatacctgtccgcctttctcccttcgggaagcgtggcgctttctcaatgctcacgctgtaggtatctcagttcggtgtaggtcgttcgctccaagctgggctgtgtgcacgaaccccccgttcagcccgaccgctgcgccttatccggtaactatcgtcttgagtccaacccggtaagacacgacttatcgccactggcagcagccactggtaacaggattagcagagcgaggtatgtaggcggtgctacagagttcttgaagtggtggcctaactacggctacactagaaggacagtatttggtatctgcgctctgctgaagccagttaccttcggaaaaagagttggtagctcttgatccggcaaacaaaccaccgctggtagcggtggtttttttgtttgcaagcagcagattacgcgcagaaaaaaaggatctcaagaagatcctttgatcttttctacggggtctgacgctcagtggaacgaaaactcacgttaagggattttggtcatgacattaacctataaaaataggcgtatcacgaggccctttcgtctcgcgcgtttcggtgatgacggtgaaaacctctgacacatgcagctcccggagacggtcacagcttgtctgtaagcggatgccgggagcagacaagcccgtcagggcgcgtcagcgggtgttggcgggtgtcggggctggcttaactatgcggcatcagagcagattgtactgagagtgcaccatatggacatattgtcgttagaacgcggctacaattaatacataaccttatgtatcatacacatacgatttaggtgacactatagaacggcgcgccaagcttttgatccatgcccttcatttgccgcttattaattaatttggtaacagtccgtactaatcagttacttatccttcccccatcataattaatcttggtagtctcgaatgccacaacactgactagtctcttggatcataagaaaaagccaaggaacaaaagaagacaaaacacaatgagagtatcctttgcatagcaatgtctaagttcataaaattcaaacaaaaacgcaatcacacacagtggacatcacttatccactagctgatcaggatcgccgcgtcaagaaaaaaaaactggaccccaaaagccatgcacaacaacacgtactcacaaaggtgtcaatcgagcagcccaaaacattcaccaactcaacccatcatgagccctcacatttgttgtttctaacccaacctcaaactcgtattctcttccgccacctcatttttgtttatttcaacacccgtcaaactgcatgccaccccgtggccaaatgtccatgcatgttaacaagacctatgactataaatagctgcaatctcggcccaggttttcatcatcaagaaccagttcaatatcctagtacaccgtattaaagaatttaagatatactgc

SEQ ID NO: 11 - DNA, 9142 bp, Artificial Sequence
  T-DNA of vector pZBL120xKS333
  misc_feature (1892)..(1892): n is a, c, g, or t
aattacaacggtatatatcctgccgtcgactctagaggatccgcgccgtcgacggatccactagttctagagcggcccgcgccgtcgacggatataatgagccgtaaacaaagatgattaagtagtaattaatacgtactagtaaaagtggcaaaagataacgagaaagaaccaatttctttgcattcggccttagcggaaggcatatataagctttgattattttatttagtgtaatgatttcgtacaaccaaagcatttatttagtactctcacacttgtgtcgcggccggccgctacaggaacaggtggtggcggccctcggcgcgctcgtactgctccacgatggtgtagtcctcgttgtgggaggtgatgtccagcttggagtccacgtagtagtagccgggcagctgcacgggcttcttggccatgtagatggacttgaactccaccaggtagtggccgccgtccttcagcttcagggccttgtggatctcgcccttcagcacgccgtcgcgggggtacaggcgctcggtggaggcctcccagcccatagtcttcttctgcattacggggccgtcggaggggaagttcacgccgatgaacttcaccttgtagatgaaggagccgtcctgcagggaggagtcctgggtcacggtcaccacgccgccgtcctcgaagttcatcacgcgctcccacttgaagccctcggggaaggacagcttcttgtagtcggggatgtcggcggggtgcttcacgtacaccttggagccgtactggaactggggggacaggatgtcccaggcgaagggcagggggccgcccttggtcaccttcagcttggcggtctgggtgccctcgtaggggcggccctcgccctcgccctcgatctcgaactcgtggccgttcacggagccctccatgcgcaccttgaagcgcatgaactccttgatgacgtcctcggaggaggccatgggccgcttggggggctatggaagactttcttagttagttgtgtgaataagcaatgttgggagaatcgggactacttataggataggaataaaacagaaaagtattaagtgctaatgaaatatttagactgataattaaaatcttcacgtatgtccacttgatataaaaacgtcaggaataaaggaagtacagtagaatttaaaggtactctttttatatatacccgtgttctctttttggctagctagttgcataaaaaataatctatatttttatcattattttaaatatcttatgagatggtaaatatttatcataattttttttactattatttattatttgtgtgtgtaatacatatagaagttaattacaaattttatttactttttcattattttgatatgattcaccattaatttagtgttattatttataatagttcattttaatctttttgtatatattatgcgtgcagtacttttttcctacatataactactattacattttatttatataatatttttattaatgaattttcgtgataatatgtaatattgttcattattatttcagattttttaaaaatatttgtgttattatttatgaaatatgtaatttttttagtatttgattttatgatgataaagtgttctaaattcaaaagaagggggaaagcgtaaacattaaaaaacgtcatcaaacaaaaacaaaatcttgttaataaagataaaactgtttgttttgatcactgttatttcgtaatataaaaacattatttatatttatattgttgacaaccaaatttgcctatcaaatctaaccaatataatgcatgcgtggcaggtaatgtactaccatgaacttaagtcatgacataataaaccgtgaatctgaccaatgcatgtacctanctaaattgtatttgtgacacgaagcaaatgattcaattcacaatggagatgggaaacaaataatgaagaacccagaactaagaaagcttttctgaaaaataaaataaaggcaatgtcaaaagtatactgcatcatcagtccagaaagcacatgatatttttttatcagtatcaatgcagctagttttattttacaatatcgatatagctagtttaaatatattgcagctagatttataaatatttgtgttattatttatcatttgtgtaatcctgtttttagtattttagtttatatatgatgataatgtattccaaatttaaaagaagggaaataaatttaaacaagaaaaaaagtcatcaaacaaaaaacaaatgaaagggtggaaagatgttaccatgtaatgtgaatgttacagtatttcttttattatagagttaacaaattaactaatatgattttgttaataatgataaaatattttttttattattatttcataatataaaaatagtttacttaatataaaaaaaattctatcgttcacaacaaagttggccacctaatttaaccatgcatgtacccatggaccatattaggtaaccatcaaacctgatgaagagataaagagatgaagacttaagtcataacacaaaaccataaaaaacaaaaatacaatcaaccgtcaatctgaccaatgcatgaaaaagctgcaatagtgagtggcgacacaaagcacatgattttcttacaacggagataaaaccaaaaaaatatttcatgaacaacctagaacaaataaagcttttatataataaatatataaataaataaaggctatggaataatatacttcaatatatttggattaaataaattgttggcggggttgatatatttatacacacctaaagtcacttcaatctcattttcacttaacttttattttttttttctttttatttatcataaagagaatattgataatatactttttaacatatttttatgacattttttattggtgaaaacttattaaaaatcataaattttgtaagttagatttatttaaagagttcctcttcttattttaaattttttaataaatttttaaataactaaaatttgtgttaaaaatgttaaaaaagtgtgttattaacccttctcttcgaggatccaagcttgttgaaacatccctgaagtgtctcattttattttatttattctttgctgataaaaaaataaaataaaagaagctaagcacacggtcaaccattgctctactgctaaaagggttatgtgtagtgttttactgcataaattatgcagcaaacaagacaactcaaattaaaaaatttcctttgcttgtttttttgttgtctctgacttgactttcttgtggaagttggttgtataaggattgggacaccattgtccttcttaatttaattttattctttgctgataaaaaaaaaaatttcatatagtgttaaataataatttgttaaataaccaaaaagtcaaatatgtttactctcgtttaaataattgagattcgtccagcaaggctaaacgattgtatagatttatgacaatatttacttttttatagataaatgttatattataataaatttatatacatatattatatgttatttattattattttaaatccttcaatattttatcaaaccaactcataattttttttttatctgtaagaagcaataaaattaaatagacccactttaaggatgatccaacctttatacagagtaagagagttcaaatagtaccctttcatatacatatcaactaaaatattagaaatatcatggatcaaaccttataaagacattaaataagtggataagtataatatataaatgggtagtatataatatataaatggatacaaacttctctctttataattgttatgtctccttaacatcctaatataatacataagtgggtaatatataatatataaatggagacaaacttcttccattataattgttatgtcttcttaacacttatgtctcgttcacaatgctaaggttagaattgtttagaaagtcttatagtacacatttgtttttgtactatttgaagcattccataagccgtcacgattcagatgatttataataataagaggaaatttatcatagaacaataaggtgcatagatagagtgttaatatatcataacatcctttgtttattcatagaagaagtgagatggagctcagttattatactgttacatggtcggatacaatattccatgctctccatgagctcttacacctacatgcattttagttcatacttgcggccgctcaaaccctaaattcacacgaaaccgaggtggttatcgacgacgaagatggcgaagtagtcgagaacaaccccctctcctcatgatcactcttcatcatctccattttccccacatcttctaacttctcacccccctccccgcacctctcgtcttccaagctcgcctcgaatatcaacccgatgtcgtcctcgaacccgatctcatcaaagaacaggtcaggcaattcgccagacttctcgagggggaggtcggggacctgcacgaaccccgtgtctaggaatgaccaatgcagatcatgatcctcctccattgtcgtcgggctgttctccatcgacgggaactggaggggcgagcctgagaacgccatcgtcgtctgttgctgttgctgctgtactacttcgccttcctcagaagaggaagcaggggagcagttgggctgtaggggctgctctgctgctggaaaaactgatgatttattctccagccgcccaatgtaattgctgatgtcgaaattggtcactgcattgacccctctgtactcaattgcagccatgtcatatgctgctgctgcttcctcttgtgtgttgtaagttcccaggtaaagatatttgcttccgaaaacacggccgatccgcgcctcccaccggccgttgtggtggtggcgggccacgccgcggtacttcgatacgcctctcgaaaatccgctgctccgccgccgtaacgacgccaaatactcctccttcgtaactttccgcatttcttctatttcattcctgtacgactctaccgggaaattgagggtggttccgggaccccagtacttgagggcagcgaggtcataagttcgggcggcagcttcctcgttatcgtatgctcccaaataaacttgccttccttttttgttctgaatgctattccacgaactcttgtcccagagatgcgcttcgaaccggccggtccatcggtgcctagtgactcctctgtaaatggagctccggcggccggaagaggcattgttgttgctgctgttgttgttattaccgttacgattctcaatctcgcatttggcgtcgtcctgattccgcttccggcgtttcgctccggtcttctccgattgcggccggcgcggaggggcggcgagattgagattattgctgtcgaagccgccgccgccgacgcaggaggaggaggaggaggaggaagtagaaacagagggagaccttctcatggcggccgcagtatatcttaaattctttaatacggtgtactaggatattgaactggttcttgatgatgaaaacctgggccgagattgcagctatttatagtcataggtcttgttaacatgcatggacatttggccacggggtggcatgcagtttgacgggtgttgaaataaacaaaaatgaggtggcggaagagaatacgagtttgaggttgggttagaaacaacaaatgtgagggctcatgatgggttgagttggtgaatgttttgggctgctcgattgacacctttgtgagtacgtgttgttgtgcatggcttttggggtccagtttttttttcttgacgcggcgatcctgatcagctagtggataagtgatgtccactgtgtgtgattgcgtttttgtttgaattttatgaacttagacattgctatgcaaaggatactctcattgtgttttgtcttcttttgttccttggctttttcttatgatccaagagactagtcagtgttgtggcattcgagactaccaagattaattatgatgggggaaggataagtaactgattagtacggactgttaccaaattaattaataagcggcaaatgaagggcatggatcaaaagcttggcgcgaattcactggccgtcgttttacaacgtcgtgactgggaaaaccctggcgttacccaacttaatcgccttgcagcacatccccctttcgccagctggcgtaatagcgaagaggcccgcaccgatcgcccttcccaacagttgcgcagcctgaatggcgaatggatcgatccgtcgatcgaccaaagcggccatcgtgcctccccactcctgcagttcgggggcatggatgcgcggatagccgctgctggtttcctggatgccgacggatttgcactgccggtagaactccgcgaggtcgtccagcctcaggcagcagctgaaccaactcgcgaggggatcgagcccctgctgagcctcgacatgttgtcgcaaaattcgccctggacccgcccaacgatttgtcgtcactgtcaaggtttgacctgcacttcatttggggcccacatacaccaaaaaaatgctgcataattctcggggcagcaagtcggttacccggccgccgtgctggaccgggttgaatggtgcccgtaactttcggtagagcggacggccaatactcaacttcaaggaatctcacccatgcgcgccggcggggaaccggagttcccttcagtgaacgttattagttcgccgctcggtgtgtcgtagatactagcccctggggccttttgaaatttgaataagatttatgtaatcagtcttttaggtttgaccggttctgccgctttttttaaaattggatttgtaataataaaacgcaattgtttgttattgtggcgctctatcatagatgtcgctataaacctattcagcacaatatattgttttcattttaatattgtacatataagtagtagggtacaatcagtaaattgaacggagaatattattcataaaaatacgatagtaacgggtgatatattcattagaatgaaccgaaaccggcggtaaggatctgagctacacatgctcaggttttttacaacgtgcacaacagaattgaaagcaaatatcatgcgatcataggcgtctcgcatatctcattaaagcagggggtgggcgaagaactccagcatgagatccccgcgctggaggatcatccagccggcgtcccggaaaacgattccgaagcccaacctttcatagaaggcggcggtggaatcgaaatctcgtgatggcaggttgggcgtcgcttggtcggtcatttcgaaccccagagtcccgctcagaagaactcgtcaagaaggcgatagaaggcgatgcgctgcgaatcgggagcggcgataccgtaaagcacgaggaagcggtcagcccattcgccgccaagctcttcagcaatatcacgggtagccaacgctatgtcctgatagcggtccgccacacccagccggccacagtcgatgaatccagaaaagcggccattttccaccatgatattcggcaagcaggcatcgccatgggtcacgacgagatcctcgccgtcgggcatgcgcgccttgagcctggcgaacagttcggctggcgcgagcccctgatgctcttcgtccagatcatcctgatcgacaagaccggcttccatccgagtacgtgctcgctcgatgcgatgtttcgcttggtggtcgaatgggcaggtagccggatcaagcgtatgcagccgccgcattgcatcagccatgatggatactttctcggcaggagcaaggtgagatgacaggagatcctgccccggcacttcgcccaatagcagccagtcccttcccgcttcagtgacaacgtcgagcacagctgcgcaaggaacgcccgtcgtggccagccacgatagccgcgctgcctcgtcctgcagttcattcagggcaccggacaggtcggtcttgacaaaaagaaccgggcgcccctgcgctgacagccggaacacggcggcatcagagcagccgattgtctgttgtgcccagtcatagccgaatagcctctccacccaagcggccggagaacctgcgtgcaatccatcttgttcaatcatgcgaaacgatccccgcaagcttggagactggtgatttcagcgtgtcctctccaaatgaaatgaacttccttatatagaggaagggtcttgcgaaggatagtgggattgtgcgtcatcccttacgtcagtggagatatcacatcaatccacttgctttgaagacgtggttggaacgtcttctttttccacgatgctcctcgtgggtgggggtccatctttgggaccactgtcggcagaggcatcttcaacgatggcctttcctttatcgcaatgatggcatttgtaggagccaccttccttttccactatcttcacaataaagtgacagatagctgggcaatggaatccgaggaggtttccggatattaccctttgttgaaaagtctcaattgccctttggtcttctgagactgtatctttgatatttttggagtagacaagcgtgtcgtgctccaccatgttgacgaagattttcttcttgtcattgagtcgtaagagactctgtatgaactgttcgccagtctttacggcgagttctgttaggtcctctatttgaatctttgactccatggcctttgattcagtgggaactacctttttagagactccaatctctattacttgccttggtttgtgaagcaagccttgaatcgtccatactggaatagtacttctgatcttgagaaatatatctttctctgtgttcttgatgcagttagtcctgaatcttttgactgcatctttaaccttcttgggaaggtatttgatctcctggagattattgctcgggtagatcgtcttgatgagacctgctgcgtaagcctctctaaccatctgtgggttagcattctttctgaaattgaaaaggctaatcttctcattatcagtggtgaacatggtatcgtcaccttctccgtcgaacttcctgactagatcgtagagatagaggaagtcgtccattgtgatctctggggcaaaggagatctgaattatcatttacaattgaatatatcctgcca

SEQ ID NO: 12 - DNA, 34 bp, Artificial Sequence
  PCR primer MWG341
gaattcgcggccgcatgaagaggtctccagcatc

SEQ ID NO: 13 - DNA, 34 bp, Artificial Sequence
  PCR primer MWG342
gaattcgcggccgctcatagatctagagcatagt

SEQ ID NO: 14 - DNA, 11304 bp, Artificial Sequence
  vector pKS334
  misc_feature (3593)..(3593): n is a, c, g, or t
ggccgcatgaagaggtctccagcatcttcttgttcatcatctacttcctctgttgggtttgaagctcccattgaaaaaagaaggcctaagcatccaaggaggaataatttgaagtcacaaaaatgcaagcagaaccaaaccaccactggtggcagaagaagctctatctatagaggagttacaaggcataggtggacagggaggtttgaagctcacctatgggataagagctcttggaacaacattcagagcaagaagggtcgacaagtttatttgggggcatatgatactgaagaatctgcagcccgtacctatgaccttgcagcccttaaatactggggaaaagatgcaaccctgaatttcccgatagaaacttataccaaggagctcgaggaaatggacaaggtttcaagagaagaatatttggcttctttgcggcgccaaagcagtggcttttctagaggcctgtctaagtaccgtggggttgctaggcatcatcataatggtcgctgggaagcacgaattggaagagtatgcggaaacaagtacctctacttggggacatataaaactcaagaggaggcagcagtggcatatgacatggcagcaatagagtaccgtggagtcaatgcagtgaccaattttgacataagcaactacatggacaaaataaagaagaaaaatgaccaaacccaacaacaacaaacagaagcacaaacggaaacagttcctaactcctctgactctgaagaagtagaagtagaacaacagacaacaacaataaccacaccacccccatctgaaaatctgcacatgccaccacagcagcaccaagttcaatacaccccccatgtctctccaagggaagaagaatcatcatcactgatcacaattatggaccatgtgcttgagcaggatctgccatggagcttcatgtacactggcttgtctcagtttcaagatccaaacttggctttctgcaaaggtgatgatgacttggtgggcatgtttgatagtgcagggtttgaggaagacattgattttctgttcagcactcaacctggtgatgagactgagagtgatgtcaacaatatgagcgcagttttggatagtgttgagtgtggagacacaaatggggctggtggaagcatgatgcatgtggataacaagcagaagatagtatcatttgcttcttcaccatcatctacaactacagtttcttgtgactatgctctagatctagcggccgcaagtatgaactaaaatgcatgtaggtgtaagagctcatggagagcatggaatattgtatccgaccatgtaacagtataataactgagctccatctcacttcttctatgaataaacaaaggatgttatgatatattaacactctatctatgcaccttattgttctatgataaatttcctcttattattataaatcatctgaatcgtgacggcttatggaatgcttcaaatagtacaaaaacaaatgtgtactataagactttctaaacaattctaaccttagcattgtgaacgagacataagtgttaagaagacataacaattataatggaagaagtttgtctccatttatatattatatattacccacttatgtattatattaggatgttaaggagacataacaattataaagagagaagtttgtatccatttatatattatatactacccatttatatattatacttatccacttatttaatgtctttataaggtttgatccatgatatttctaatattttagttgatatgtatatgaaagggtactatttgaactctcttactctgtataaaggttggatcatccttaaagtgggtctatttaattttattgcttcttacagataaaaaaaaaattatgagttggtttgataaaatattgaaggatttaaaataataataaataacatataatatatgtatataaatttattataatataacatttatctataaaaaagtaaatattgtcataaatctatacaatcgtttagccttgctggacgaatctcaattatttaaacgagagtaaacatatttgactttttggttatttaacaaattattatttaacactatatgaaatttttttttttatcagcaaagaataaaattaaattaagaaggacaatggtgtcccaatccttatacaaccaacttccacaagaaagtcaagtcagagacaacaaaaaaacaagcaaaggaaattttttaatttgagttgtcttgtttgctgcataatttatgcagtaaaacactacacataacccttttagcagtagagcaatggttgaccgtgtgcttagcttcttttattttatttttttatcagcaaagaataaataaaataaaatgagacacttcagggatgtttcaacaagcttggatcctcgaagagaagggttaataacacacttttttaacatttttaacacaaattttagttatttaaaaatttattaaaaaatttaaaataagaagaggaactctttaaataaatctaacttacaaaatttatgatttttaataagttttcaccaataaaaaatgtcataaaaatatgttaaaaagtatattatcaatattctctttatgataaataaaaagaaaaaaaaaataaaagttaagtgaaaatgagattgaagtgactttaggtgtgtataaatatatcaaccccgccaacaatttatttaatccaaatatattgaagtatattattccatagcctttatttatttatatatttattatataaaagctttatttgttctaggttgttcatgaaatatttttttggttttatctccgttgtaagaaaatcatgtgctttgtgtcgccactcactattgcagctttttcatgcattggtcagattgacggttgattgtatttttgttttttatggttttgtgttatgacttaagtcttcatctctttatctcttcatcaggtttgatggttacctaatatggtccatgggtacatgcatggttaaattaggtggccaactttgttgtgaacgatagaattttttttatattaagtaaactatttttatattatgaaataataataaaaaaaatattttatcattattaacaaaatcatattagttaatttgttaactctataataaaagaaatactgtaacattcacattacatggtaacatctttccaccctttcatttgttttttgtttgatgactttttttcttgtttaaatttatttcccttcttttaaatttggaatacattatcatcatatataaactaaaatactaaaaacaggattacacaaatgataaataataacacaaatatttataaatctagctgcaatatatttaaactagctatatcgatattgtaaaataaaactagctgcattgatactgataaaaaaatatcatgtgctttctggactgatgatgcagtatacttttgacattgcctttattttatttttcagaaaagctttcttagttctgggttcttcattatttgtttcccatctccattgtgaattgaatcatttgcttcgtgtcacaaatacaatttagntaggtacatgcattggtcagattcacggtttattatgtcatgacttaagttcatggtagtacattacctgccacgcatgcattatattggttagatttgataggcaaatttggttgtcaacaatataaatataaataatgtttttatattacgaaataacagtgatcaaaacaaacagttttatctttattaacaagattttgtttttgtttgatgacgttttttaatgtttacgctttcccccttcttttgaatttagaacactttatcatcataaaatcaaatactaaaaaaattacatatttcataaataataacacaaatatttttaaaaaatctgaaataataatgaacaatattacatattatcacgaaaattcattaataaaaatattatataaataaaatgtaatagtagttatatgtaggaaaaaagtactgcacgcataatatatacaaaaagattaaaatgaactattataaataataacactaaattaatggtgaatcatatcaaaataatgaaaaagtaaataaaatttgtaattaacttctatatgtattacacacacaaataataaataatagtaaaaaaaattatgataaatatttaccatctcataagatatttaaaataatgataaaaatatagattattttttatgcaactagctagccaaaaagagaacacgggtatatataaaaagagtacctttaaattctactgtacttcctttattcctgacgtttttatatcaagtggacatacgtgaagattttaattatcagtctaaatatttcattagcacttaatacttttctgttttattcctatcctataagtagtcccgattctcccaacattgcttattcacacaactaactaagaaagtcttccatagccccccaagcggcccatggcctcctccgaggacgtcatcaaggagttcatgcgcttcaaggtgcgcatggagggctccgtgaacggccacgagttcgagatcgagggcgagggcgagggccgcccctacgagggcacccagaccgccaagctgaaggtgaccaagggcggccccctgcccttcgcctgggacatcctgtccccccagttccagtacggctccaaggtgtacgtgaagcaccccgccgacatccccgactacaagaagctgtccttccccgagggcttcaagtgggagcgcgtgatgaacttcgaggacggcggcgtggtgaccgtgacccaggactcctccctgcaggacggctccttcatctacaaggtgaagttcatcggcgtgaacttcccctccgacggccccgtaatgcagaagaagactatgggctgggaggcctccaccgagcgcctgtacccccgcgacggcgtgctgaagggcgagatccacaaggccctgaagctgaaggacggcggccactacctggtggagttcaagtccatctacatggccaagaagcccgtgcagctgcccggctactactacgtggactccaagctggacatcacctcccacaacgaggactacaccatcgtggagcagtacgagcgcgccgagggccgccaccacctgttcctgtagcggccggccgcgacacaagtgtgagagtactaaataaatgctttggttgtacgaaatcattacactaaataaaataatcaaagcttatatatgccttccgctaaggccgaatgcaaagaaattggttctttctcgttatcttttgccacttttactagtacgtattaattactacttaatcatctttgtttacggctcattatatccgtcgacggcgcgggccgctctagaactagtggatccgtcgacggcgcgcccgatcatccggatatagttcctcctttcagcaaaaaacccctcaagacccgtttagaggccccaaggggttatgctagttattgctcagcggtggcagcagccaactcagcttcctttcgggctttgttagcagccggatcgatccaagctgtacctcactattcctttgccctcggacgagtgctggggcgtcggtttccactatcggcgagtacttctacacagccatcggtccagacggccgcgcttctgcgggcgatttgtgtacgcccgacagtcccggctccggatcggacgattgcgtcgcatcgaccctgcgcccaagctgcatcatcgaaattgccgtcaaccaagctctgatagagttggtcaagaccaatgcggagcatatacgcccggagccgcggcgatcctgcaagctccggatgcctccgctcgaagtagcgcgtctgctgctccatacaagccaaccacggcctccagaagaagatgttggcgacctcgtattgggaatccccgaacatcgcctcgctccagtcaatgaccgctgttatgcggccattgtccgtcaggacattgttggagccgaaatccgcgtgcacgaggtgccggacttcggggcagtcctcggcccaaagcatcagctcatcgagagcctgcgcgacggacgcactgacggtgtcgtccatcacagtttgccagtgatacacatggggatcagcaatcgcgcatatgaaatcacgccatgtagtgtattgaccgattccttgcggtccgaatgggccgaacccgctcgtctggctaagatcggccgcagcgatcgcatccatagcctccgcgaccggctgcagaacagcgggcagttcggtttcaggcaggtcttgcaacgtgacaccctgtgcacggcgggagatgcaataggtcaggctctcgctgaattccccaatgtcaagcacttccggaatcgggagcgcggccgatgcaaagtgccgataaacataacgatctttgtagaaaccatcggcgcagctatttacccgcaggacatatccacgccctcctacatcgaagctgaaagcacgagattcttcgccctccgagagctgcatcaggtcggagacgctgtcgaacttttcgatcagaaacttctcgacagacgtcgcggtgagttcaggcttttccatgggtatatctccttcttaaagttaaacaaaattatttctagagggaaaccgttgtggtctccctatagtgagtcgtattaatttcgcgggatcgagatcgatccaattccaatcccacaaaaatctgagcttaacagcacagttgctcctctcagagcagaatcgggtattcaacaccctcatatcaactactacgttgtgtataacggtccacatgccggtatatacgatgactggggttgtacaaaggcggcaacaaacggcgttcccggagttgcacacaagaaatttgccactattacagaggcaagagcagcagctgacgcgtacacaacaagtcagcaaacagacaggttgaacttcatccccaaaggagaagctcaactcaagcccaagagctttgctaaggccctaacaagcccaccaaagcaaaaagcccactggctcacgctaggaaccaaaaggcccagcagtgatccagccccaaaagagatctcctttgccccggagattacaatggacgatttcctctatctttacgatctaggaaggaagttcgaaggtgaaggtgacgacactatgttcaccactgataatgagaaggttagcctcttcaatttcagaaagaatgctgacccacagatggttagagaggcctacgcagcaggtctcatcaagacgatctacccgagtaacaatctccaggagatcaaataccttcccaagaaggttaaagatgcagtcaaaagattcaggactaattgcatcaagaacacagagaaagacatatttctcaagatcagaagtactattccagtatggacgattcaaggcttgcttcataaaccaaggcaagtaatagagattggagtctctaaaaaggtagttcctactgaatctaaggccatgcatggagtctaagattcaaatcgaggatctaacagaactcgccgtgaagactggcgaacagttcatacagagtcttttacgactcaatgacaagaagaaaatcttcgtcaacatggtggagcacgacactctggtctactccaaaaatgtcaaagatacagtctcagaagaccaaagggctattgagacttttcaacaaaggataatttcgggaaacctcctcggattccattgcccagctatctgtcacttcatcgaaaggacagtagaaaaggaaggtggctcctacaaatgccatcattgcgataaaggaaaggctatcattcaagatgcctctgccgacagtggtcccaaagatggacccccacccacgaggagcatcgtggaaaaagaagacgttccaaccacgtcttcaaagcaagtggattgatgtgacatctccactgacgtaagggatgacgcacaatcccactatccttcgcaagacccttcctctatataaggaagttcatttcatttggagaggacacgctcgagctcatttctctattacttcagccataacaaaagaactcttttctcttcttattaaaccatgaaaaagcctgaactcaccgcgacgtctgtcgagaagtttctgatcgaaaagttcgacagcgtctccgacctgatgcagctctcggagggcgaagaatctcgtgctttcagcttcgatgtaggagggcgtggatatgtcctgcgggtaaatagctgcgccgatggtttctacaaagatcgttatgtttatcggcactttgcatcggccgcgctcccgattccggaagtgcttgacattggggaattcagcgagagcctgacctattgcatctcccgccgtgcacagggtgtcacgttgcaagacctgcctgaaaccgaactgcccgctgttctgcagccggtcgcggaggccatggatgcgatcgctgcggccgatcttagccagacgagcgggttcggcccattcggaccgcaaggaatcggtcaatacactacatggcgtgatttcatatgcgcgattgctgatccccatgtgtatcactggcaaactgtgatggacgacaccgtcagtgcgtccgtcgcgcaggctctcgatgagctgatgctttgggccgaggactgccccgaagtccggcacctcgtgcacgcggatttcggctccaacaatgtcctgacggacaatggccgcataacagcggtcattgactggagcgaggcgatgttcggggattcccaatacgaggtcgccaacatcttcttctggaggccgtggttggcttgtatggagcagcagacgcgctacttcgagcggaggcatccggagcttgcaggatcgccgcggctccgggcgtatatgctccgcattggtcttgaccaactctatcagagcttggttgacggcaatttcgatgatgcagcttgggcgcagggtcgatgcgacgcaatcgtccgatccggagccgggactgtcgggcgtacacaaatcgcccgcagaagcgcggccgtctggaccgatggctgtgtagaagtactcgccgatagtggaaaccgacgccccagcactcgtccgagggcaaaggaatagtgaggtacctaaagaaggagtgcgtcgaagcagatcgttcaaacatttggcaataaagtttcttaagattgaatcctgttgccggtcttgcgatgattatcatataatttctgttgaattacgttaagcatgtaataattaacatgtaatgcatgacgttatttatgagatgggtttttatgattagagtcccgcaattatacatttaatacgcgatagaaaacaaaatatagcgcgcaaactaggataaattatcgcgcgcggtgtcatctatgttactagatcgatgtcgaatctgatcaacctgcattaatgaatcggccaacgcgcggggagaggcggtttgcgtattgggcgctcttccgcttcctcgctcactgactcgctgcgctcggtcgttcggctgcggcgagcggtatcagctcactcaaaggcggtaatacggttatccacagaatcaggggataacgcaggaaagaacatgtgagcaaaaggccagcaaaaggccaggaaccgtaaaaaggccgcgttgctggcgtttttccataggctccgcccccctgacgagcatcacaaaaatcgacgctcaagtcagaggtggcgaaacccgacaggactataaagataccaggcgtttccccctggaagctccctcgtgcgctctcctgttccgaccctgccgcttaccggatacctgtccgcctttctcccttcgggaagcgtggcgctttctcaatgctcacgctgtaggtatctcagttcggtgtaggtcgttcgctccaagctgggctgtgtgcacgaaccccccgttcagcccgaccgctgcgccttatccggtaactatcgtcttgagtccaacccggtaagacacgacttatcgccactggcagcagccactggtaacaggattagcagagcgaggtatgtaggcggtgctacagagttcttgaagtggtggcctaactacggctacactagaaggacagtatttggtatctgcgctctgctgaagccagttaccttcggaaaaagagttggtagctcttgatccggcaaacaaaccaccgctggtagcggtggtttttttgtttgcaagcagcagattacgcgcagaaaaaaaggatctcaagaagatcctttgatcttttctacggggtctgacgctcagtggaacgaaaactcacgttaagggattttggtcatgacattaacctataaaaataggcgtatcacgaggccctttcgtctcgcgcgtttcggtgatgacggtgaaaacctctgacacatgcagctcccggagacggtcacagcttgtctgtaagcggatgccgggagcagacaagcccgtcagggcgcgtcagcgggtgttggcgggtgtcggggctggcttaactatgcggcatcagagcagattgtactgagagtgcaccatatggacatattgtcgttagaacgcggctacaattaatacataaccttatgtatcatacacatacgatttaggtgacactatagaacggcgcgccaagcttttgatccatgcccttcatttgccgcttattaattaatttggtaacagtccgtactaatcagttacttatccttcccccatcataattaatcttggtagtctcgaatgccacaacactgactagtctcttggatcataagaaaaagccaaggaacaaaagaagacaaaacacaatgagagtatcctttgcatagcaatgtctaagttcataaaattcaaacaaaaacgcaatcacacacagtggacatcacttatccactagctgatcaggatcgccgcgtcaagaaaaaaaaactggaccccaaaagccatgcacaacaacacgtactcacaaaggtgtcaatcgagcagcccaaaacattcaccaactcaacccatcatgagccctcacatttgttgtttctaacccaacctcaaactcgtattctcttccgccacctcatttttgtttatttcaacacccgtcaaactgcatgccaccccgtggccaaatgtccatgcatgttaacaagacctatgactataaatagctgcaatctcggcccaggttttcatcatcaagaaccagttcaatatcctagtacaccgtattaaagaatttaagatatactgc

SEQ ID NO: 15 - DNA, 9147 bp, Artificial Sequence
  T-DNA of vector pZBL120xKS334
  misc_feature (1892)..(1892): n is a, c, g, or t
aattacaacggtatatatcctgccgtcgactctagaggatccgcgccgtcgacggatccactagttctagagcggcccgcgccgtcgacggatataatgagccgtaaacaaagatgattaagtagtaattaatacgtactagtaaaagtggcaaaagataacgagaaagaaccaatttctttgcattcggccttagcggaaggcatatataagctttgattattttatttagtgtaatgatttcgtacaaccaaagcatttatttagtactctcacacttgtgtcgcggccggccgctacaggaacaggtggtggcggccctcggcgcgctcgtactgctccacgatggtgtagtcctcgttgtgggaggtgatgtccagcttggagtccacgtagtagtagccgggcagctgcacgggcttcttggccatgtagatggacttgaactccaccaggtagtggccgccgtccttcagcttcagggccttgtggatctcgcccttcagcacgccgtcgcgggggtacaggcgctcggtggaggcctcccagcccatagtcttcttctgcattacggggccgtcggaggggaagttcacgccgatgaacttcaccttgtagatgaaggagccgtcctgcagggaggagtcctgggtcacggtcaccacgccgccgtcctcgaagttcatcacgcgctcccacttgaagccctcggggaaggacagcttcttgtagtcggggatgtcggcggggtgcttcacgtacaccttggagccgtactggaactggggggacaggatgtcccaggcgaagggcagggggccgcccttggtcaccttcagcttggcggtctgggtgccctcgtaggggcggccctcgccctcgccctcgatctcgaactcgtggccgttcacggagccctccatgcgcaccttgaagcgcatgaactccttgatgacgtcctcggaggaggccatgggccgcttggggggctatggaagactttcttagttagttgtgtgaataagcaatgttgggagaatcgggactacttataggataggaataaaacagaaaagtattaagtgctaatgaaatatttagactgataattaaaatcttcacgtatgtccacttgatataaaaacgtcaggaataaaggaagtacagtagaatttaaaggtactctttttatatatacccgtgttctctttttggctagctagttgcataaaaaataatctatatttttatcattattttaaatatcttatgagatggtaaatatttatcataattttttttactattatttattatttgtgtgtgtaatacatatagaagttaattacaaattttatttactttttcattattttgatatgattcaccattaatttagtgttattatttataatagttcattttaatctttttgtatatattatgcgtgcagtacttttttcctacatataactactattacattttatttatataatatttttattaatgaattttcgtgataatatgtaatattgttcattattatttcagattttttaaaaatatttgtgttattatttatgaaatatgtaatttttttagtatttgattttatgatgataaagtgttctaaattcaaaagaagggggaaagcgtaaacattaaaaaacgtcatcaaacaaaaacaaaatcttgttaataaagataaaactgtttgttttgatcactgttatttcgtaatataaaaacattatttatatttatattgttgacaaccaaatttgcctatcaaatctaaccaatataatgcatgcgtggcaggtaatgtactaccatgaacttaagtcatgacataataaaccgtgaatctgaccaatgcatgtacctanctaaattgtatttgtgacacgaagcaaatgattcaattcacaatggagatgggaaacaaataatgaagaacccagaactaagaaagcttttctgaaaaataaaataaaggcaatgtcaaaagtatactgcatcatcagtccagaaagcacatgatatttttttatcagtatcaatgcagctagttttattttacaatatcgatatagctagtttaaatatattgcagctagatttataaatatttgtgttattatttatcatttgtgtaatcctgtttttagtattttagtttatatatgatgataatgtattccaaatttaaaagaagggaaataaatttaaacaagaaaaaaagtcatcaaacaaaaaacaaatgaaagggtggaaagatgttaccatgtaatgtgaatgttacagtatttcttttattatagagttaacaaattaactaatatgattttgttaataatgataaaatattttttttattattatttcataatataaaaatagtttacttaatataaaaaaaattctatcgttcacaacaaagttggccacctaatttaaccatgcatgtacccatggaccatattaggtaaccatcaaacctgatgaagagataaagagatgaagacttaagtcataacacaaaaccataaaaaacaaaaatacaatcaaccgtcaatctgaccaatgcatgaaaaagctgcaatagtgagtggcgacacaaagcacatgattttcttacaacggagataaaaccaaaaaaatatttcatgaacaacctagaacaaataaagcttttatataataaatatataaataaataaaggctatggaataatatacttcaatatatttggattaaataaattgttggcggggttgatatatttatacacacctaaagtcacttcaatctcattttcacttaacttttattttttttttctttttatttatcataaagagaatattgataatatactttttaacatatttttatgacattttttattggtgaaaacttattaaaaatcataaattttgtaagttagatttatttaaagagttcctcttcttattttaaattttttaataaatttttaaataactaaaatttgtgttaaaaatgttaaaaaagtgtgttattaacccttctcttcgaggatccaagcttgttgaaacatccctgaagtgtctcattttattttatttattctttgctgataaaaaaataaaataaaagaagctaagcacacggtcaaccattgctctactgctaaaagggttatgtgtagtgttttactgcataaattatgcagcaaacaagacaactcaaattaaaaaatttcctttgcttgtttttttgttgtctctgacttgactttcttgtggaagttggttgtataaggattgggacaccattgtccttcttaatttaattttattctttgctgataaaaaaaaaaatttcatatagtgttaaataataatttgttaaataaccaaaaagtcaaatatgtttactctcgtttaaataattgagattcgtccagcaaggctaaacgattgtatagatttatgacaatatttacttttttatagataaatgttatattataataaatttatatacatatattatatgttatttattattattttaaatccttcaatattttatcaaaccaactcataattttttttttatctgtaagaagcaataaaattaaatagacccactttaaggatgatccaacctttatacagagtaagagagttcaaatagtaccctttcatatacatatcaactaaaatattagaaatatcatggatcaaaccttataaagacattaaataagtggataagtataatatataaatgggtagtatataatatataaatggatacaaacttctctctttataattgttatgtctccttaacatcctaatataatacataagtgggtaatatataatatataaatggagacaaacttcttccattataattgttatgtcttcttaacacttatgtctcgttcacaatgctaaggttagaattgtttagaaagtcttatagtacacatttgtttttgtactatttgaagcattccataagccgtcacgattcagatgatttataataataagaggaaatttatcatagaacaataaggtgcatagatagagtgttaatatatcataacatcctttgtttattcatagaagaagtgagatggagctcagttattatactgttacatggtcggatacaatattccatgctctccatgagctcttacacctacatgcattttagttcatacttgcggccgctagatctagagcatagtcacaagaaactgtagttgtagatgatggtgaagaagcaaatgatactatcttctgcttgttatccacatgcatcatgcttccaccagccccatttgtgtctccacactcaacactatccaaaactgcgctcatattgttgacatcactctcagtctcatcaccaggttgagtgctgaacagaaaatcaatgtcttcctcaaaccctgcactatcaaacatgcccaccaagtcatcatcacctttgcagaaagccaagtttggatcttgaaactgagacaagccagtgtacatgaagctccatggcagatcctgctcaagcacatggtccataattgtgatcagtgatgatgattcttcttcccttggagagacatggggggtgtattgaacttggtgctgctgtggtggcatgtgcagattttcagatgggggtggtgtggttattgttgttgtctgttgttctacttctacttcttcagagtcagaggagttaggaactgtttccgtttgtgcttctgtttgttgttgttgggtttggtcatttttcttctttattttgtccatgtagttgcttatgtcaaaattggtcactgcattgactccacggtactctattgctgccatgtcatatgccactgctgcctcctcttgagttttatatgtccccaagtagaggtacttgtttccgcatactcttccaattcgtgcttcccagcgaccattatgatgatgcctagcaaccccacggtacttagacaggcctctagaaaagccactgctttggcgccgcaaagaagccaaatattcttctcttgaaaccttgtccatttcctcgagctccttggtataagtttctatcgggaaattcagggttgcatcttttccccagtatttaagggctgcaaggtcataggtacgggctgcagattcttcagtatcatatgcccccaaataaacttgtcgacccttcttgctctgaatgttgttccaagagctcttatcccataggtgagcttcaaacctccctgtccacctatgccttgtaactcctctatagatagagcttcttctgccaccagtggtggtttggttctgcttgcatttttgtgacttcaaattattcctccttggatgcttaggccttcttttttcaatgggagcttcaaacccaacagaggaagtagatgatgaacaagaagatgctggagacctcttcatgcggccgcagtatatcttaaattctttaatacggtgtactaggatattgaactggttcttgatgatgaaaacctgggccgagattgcagctatttatagtcataggtcttgttaacatgcatggacatttggccacggggtggcatgcagtttgacgggtgttgaaataaacaaaaatgaggtggcggaagagaatacgagtttgaggttgggttagaaacaacaaatgtgagggctcatgatgggttgagttggtgaatgttttgggctgctcgattgacacctttgtgagtacgtgttgttgtgcatggcttttggggtccagtttttttttcttgacgcggcgatcctgatcagctagtggataagtgatgtccactgtgtgtgattgcgtttttgtttgaattttatgaacttagacattgctatgcaaaggatactctcattgtgttttgtcttcttttgttccttggctttttcttatgatccaagagactagtcagtgttgtggcattcgagactaccaagattaattatgatgggggaaggataagtaactgattagtacggactgttaccaaattaattaataagcggcaaatgaagggcatggatcaaaagcttggcgcgaattcactggccgtcgttttacaacgtcgtgactgggaaaaccctggcgttacccaacttaatcgccttgcagcacatccccctttcgccagctggcgtaatagcgaagaggcccgcaccgatcgcccttcccaacagttgcgcagcctgaatggcgaatggatcgatccgtcgatcgaccaaagcggccatcgtgcctccccactcctgcagttcgggggcatggatgcgcggatagccgctgctggtttcctggatgccgacggatttgcactgccggtagaactccgcgaggtcgtccagcctcaggcagcagctgaaccaactcgcgaggggatcgagcccctgctgagcctcgacatgttgtcgcaaaattcgccctggacccgcccaacgatttgtcgtcactgtcaaggtttgacctgcacttcatttggggcccacatacaccaaaaaaatgctgcataattctcggggcagcaagtcggttacccggccgccgtgctggaccgggttgaatggtgcccgtaactttcggtagagcggacggccaatactcaacttcaaggaatctcacccatgcgcgccggcggggaaccggagttcccttcagtgaacgttattagttcgccgctcggtgtgtcgtagatactagcccctggggccttttgaaatttgaataagatttatgtaatcagtcttttaggtttgaccggttctgccgctttttttaaaattggatttgtaataataaaacgcaattgtttgttattgtggcgctctatcatagatgtcgctataaacctattcagcacaatatattgttttcattttaatattgtacatataagtagtagggtacaatcagtaaattgaacggagaatattattcataaaaatacgatagtaacgggtgatatattcattagaatgaaccgaaaccggcggtaaggatctgagctacacatgctcaggttttttacaacgtgcacaacagaattgaaagcaaatatcatgcgatcataggcgtctcgcatatctcattaaagcagggggtgggcgaagaactccagcatgagatccccgcgctggaggatcatccagccggcgtcccggaaaacgattccgaagcccaacctttcatagaaggcggcggtggaatcgaaatctcgtgatggcaggttgggcgtcgcttggtcggtcatttcgaaccccagagtcccgctcagaagaactcgtcaagaaggcgatagaaggcgatgcgctgcgaatcgggagcggcgataccgtaaagcacgaggaagcggtcagcccattcgccgccaagctcttcagcaatatcacgggtagccaacgctatgtcctgatagcggtccgccacacccagccggccacagtcgatgaatccagaaaagcggccattttccaccatgatattcggcaagcaggcatcgccatgggtcacgacgagatcctcgccgtcgggcatgcgcgccttgagcctggcgaacagttcggctggcgcgagcccctgatgctcttcgtccagatcatcctgatcgacaagaccggcttccatccgagtacgtgctcgctcgatgcgatgtttcgcttggtggtcgaatgggcaggtagccggatcaagcgtatgcagccgccgcattgcatcagccatgatggatactttctcggcaggagcaaggtgagatgacaggagatcctgccccggcacttcgcccaatagcagccagtcccttcccgcttcagtgacaacgtcgagcacagctgcgcaaggaacgcccgtcgtggccagccacgatagccgcgctgcctcgtcctgcagttcattcagggcaccggacaggtcggtcttgacaaaaagaaccgggcgcccctgcgctgacagccggaacacggcggcatcagagcagccgattgtctgttgtgcccagtcatagccgaatagcctctccacccaagcggccggagaacctgcgtgcaatccatcttgttcaatcatgcgaaacgatccccgcaagcttggagactggtgatttcagcgtgtcctctccaaatgaaatgaacttccttatatagaggaagggtcttgcgaaggatagtgggattgtgcgtcatcccttacgtcagtggagatatcacatcaatccacttgctttgaagacgtggttggaacgtcttctttttccacgatgctcctcgtgggtgggggtccatctttgggaccactgtcggcagaggcatcttcaacgatggcctttcctttatcgcaatgatggcatttgtaggagccaccttccttttccactatcttcacaataaagtgacagatagctgggcaatggaatccgaggaggtttccggatattaccctttgttgaaaagtctcaattgccctttggtcttctgagactgtatctttgatatttttggagtagacaagcgtgtcgtgctccaccatgttgacgaagattttcttcttgtcattgagtcgtaagagactctgtatgaactgttcgccagtctttacggcgagttctgttaggtcctctatttgaatctttgactccatggcctttgattcagtgggaactacctttttagagactccaatctctattacttgccttggtttgtgaagcaagccttgaatcgtccatactggaatagtacttctgatcttgagaaatatatctttctctgtgttcttgatgcagttagtcctgaatcttttgactgcatctttaaccttcttgggaaggtatttgatctcctggagattattgctcgggtagatcgtcttgatgagacctgctgcgtaagcctctctaaccatctgtgggttagcattctttctgaaattgaaaaggctaatcttctcattatcagtggtgaacatggtatcgtcaccttctccgtcgaacttcctgactagatcgtagagatagaggaagtcgtccattgtgatctctggggcaaaggagatctgaattatcatttacaattgaatatatcctgcca

SEQ ID NO: 16 - DNA, 3983 bp, Artificial Sequence
  vector pKR132
ctagagtcgacctgcaggcatgcaagcttggcgtaatcatggtcatagctgtttcctgtgtgaaattgttatccgctcacaattccacacaacatacgagccggaagcataaagtgtaaagcctggggtgcctaatgagtgagctaactcacattaattgcgttgcgctcactgcccgctttccagtcgggaaacctgtcgtgccagctgcattaatgaatcggccaacgcgcggggagaggcggtttgcgtattgggcgctcttccgcttcctcgctcactgactcgctgcgctcggtcgttcggctgcggcgagcggtatcagctcactcaaaggcggtaatacggttatccacagaatcaggggataacgcaggaaagaacatgtgagcaaaaggccagcaaaaggccaggaaccgtaaaaaggccgcgttgctggcgtttttccataggctccgcccccctgacgagcatcacaaaaatcgacgctcaagtcagaggtggcgaaacccgacaggactataaagataccaggcgtttccccctggaagctccctcgtgcgctctcctgttccgaccctgccgcttaccggatacctgtccgcctttctcccttcgggaagcgtggcgctttctcatagctcacgctgtaggtatctcagttcggtgtaggtcgttcgctccaagctgggctgtgtgcacgaaccccccgttcagcccgaccgctgcgccttatccggtaactatcgtcttgagtccaacccggtaagacacgacttatcgccactggcagcagccactggtaacaggattagcagagcgaggtatgtaggcggtgctacagagttcttgaagtggtggcctaactacggctacactagaaggacagtatttggtatctgcgctctgctgaagccagttaccttcggaaaaagagttggtagctcttgatccggcaaacaaaccaccgctggtagcggtggtttttttgtttgcaagcagcagattacgcgcagaaaaaaaggatctcaagaagatcctttgatcttttctacggggtctgacgctcagtggaacgaaaactcacgttaagggattttggtcatgagattatcaaaaaggatcttcacctagatccttttaaattaaaaatgaagttttaaatcaatctaaagtatatatgagtaaacttggtctgacagttaccaatgcttaatcagtgaggcacctatctcagcgatctgtctatttcgttcatccatagttgcctgactccccgtcgtgtagataactacgatacgggagggcttaccatctggccccagtgctgcaatgataccgcgagacccacgctcaccggctccagatttatcagcaataaaccagccagccggaagggccgagcgcagaagtggtcctgcaactttatccgcctccatccagtctattaattgttgccgggaagctagagtaagtagttcgccagttaatagtttgcgcaacgttgttgccattgctacaggcatcgtggtgtcacgctcgtcgtttggtatggcttcattcagctccggttcccaacgatcaaggcgagttacatgatcccccatgttgtgcaaaaaagcggttagctccttcggtcctccgatcgttgtcagaagtaagttggccgcagtgttatcactcatggttatggcagcactgcataattctcttactgtcatgccatccgtaagatgcttttctgtgactggtgagtactcaaccaagtcattctgagaatagtgtatgcggcgaccgagttgctcttgcccggcgtcaatacgggataataccgcgccacatagcagaactttaaaagtgctcatcattggaaaacgttcttcggggcgaaaactctcaaggatcttaccgctgttgagatccagttcgatgtaacccactcgtgcacccaactgatcttcagcatcttttactttcaccagcgtttctgggtgagcaaaaacaggaaggcaaaatgccgcaaaaaagggaataagggcgacacggaaatgttgaatactcatactcttcctttttcaatattattgaagcatttatcagggttattgtctcatgagcggatacatatttgaatgtatttagaaaaataaacaaataggggttccgcgcacatttccccgaaaagtgccacctgacgtctaagaaaccattattatcatgacattaacctataaaaataggcgtatcacgaggccctttcgtctcgcgcgtttcggtgatgacggtgaaaacctctgacacatgcagctcccggagacggtcacagcttgtctgtaagcggatgccgggagcagacaagcccgtcagggcgcgtcagcgggtgttggcgggtgtcggggctggcttaactatgcggcatcagagcagattgtactgagagtgcaccatatgcggtgtgaaataccgcacagatgcgtaaggagaaaataccgcatcaggcgccattcgccattcaggctgcgcaactgttgggaagggcgatcggtgcgggcctcttcgctattacgccagctggcgaaagggggatgtgctgcaaggcgattaagttgggtaacgccagggttttcccagtcacgacgttgtaaaacgacggccagtgaattcgagctcggtacccggggatcctctagacctgcaggccaactgcgtttggggctccagattaaacgacgccgtttcgttcctttcgcttcacggcttaacgatgtcgtttctgtctgtgcccaaaaaataaaggcatttgttatttgcaccagatatttactaagtgcaccctagtttgacaagtaggcgataattacaaatagatgcggtgcaaataataaattttgaaggaaataattacaaaagaacagaacttatatttactttattttaaaaaactaaaatgaaagaacaaaaaaagtaaaaaatacaaaaaatgtgctttaaccactttcattatttgttacagaaagtatgattctactcaaattgatctgttgtatctggtgctgccttgtcacactggcgatttcaatcccctaaagatatggtgcaaactgcgaagtgatcaatatctgctcggttaatttagattaattaataatattcaacgtgatgtaccaaaaaaagacaattttttgctccattgacaaattaaacctcatcaaggtaatttccaaacctataagcaaaaaaatttcacattaattggcccgcaatcctattagtcttattatactagagtaggaaaaaaaacaattacacaacttgtcttattattctctatgctaatgaatatttttcccttttgttagaaatcagtgtttcctaatttattgagtattaattccactcaccgcatatatttaccgttgaataagaaaattttacacataattctttttaagataaataatttttttatactagatcttatatgattacgtgaagccaagtgggttatactaatgatatataatgtttgatagtaatcagtttataaaccaaatgcatggaaatgttacgtggaagcacgtaaattaacaagcattgaagcaaatgcagccaccgcaccaaaaccaccccacttcacttccacgtaccatattccatgcaactacaacaccctaaaacttcaataaatgcccccaccttcacttcacttcacccatcaatagcaagcggccgcgaagttaaaagcaatgttgtcacttgtcgtactaacacatgatgtgatagtttatgctagctagctataacataagctgtctctgagtgtgttgtatattaataaagatcatcactggtgaatggtgatcgtgtacgtaccctacttagtaggcaatggaagcacttagagtgtgctttgtgcatggccttgcctctgttttgagacttttgtaatgttttcgagtttaaatctttgcctttgcgtacgt

SEQ ID NO: 17 - DNA, 4746 bp, Artificial Sequence
  vector pKR627
gatcctctagacctgcaggccaactgcgtttggggctccagattaaacgacgccgtttcgttcctttcgcttcacggcttaacgatgtcgtttctgtctgtgcccaaaaaataaaggcatttgttatttgcaccagatatttactaagtgcaccctagtttgacaagtaggcgataattacaaatagatgcggtgcaaataataaattttgaaggaaataattacaaaagaacagaacttatatttactttattttaaaaaactaaaatgaaagaacaaaaaaagtaaaaaatacaaaaaatgtgctttaaccactttcattatttgttacagaaagtatgattctactcaaattgatctgttgtatctggtgctgccttgtcacactggcgatttcaatcccctaaagatatggtgcaaactgcgaagtgatcaatatctgctcggttaatttagattaattaataatattcaacgtgatgtaccaaaaaaagacaattttttgctccattgacaaattaaacctcatcaaggtaatttccaaacctataagcaaaaaaatttcacattaattggcccgcaatcctattagtcttattatactagagtaggaaaaaaaacaattacacaacttgtcttattattctctatgctaatgaatatttttcccttttgttagaaatcagtgtttcctaatttattgagtattaattccactcaccgcatatatttaccgttgaataagaaaattttacacataattctttttaagataaataatttttttatactagatcttatatgattacgtgaagccaagtgggttatactaatgatatataatgtttgatagtaatcagtttataaaccaaatgcatggaaatgttacgtggaagcacgtaaattaacaagcattgaagcaaatgcagccaccgcaccaaaaccaccccacttcacttccacgtaccatattccatgcaactacaacaccctaaaacttcaataaatgcccccaccttcacttcacttcacccatcaatagcaagcggccgcgaagttaaaagcaatgttgtcacttgtcgtactaacacatgatgtgatagtttatgctagctagctataacataagctgtctctgagtgtgttgtatattaataaagatcatcactggtgaatggtgatcgtgtacgtaccctacttagtaggcaatggaagcacttagagtgtgctttgtgcatggccttgcctctgttttgagacttttgtaatgttttcgagtttaaatctttgcctttgcgtacgtctagagtcgagcatgcatctagagggcccaattcgccctatagtgagtcgtattacaattcactggccgtcgttttacaacgtcgtgactgggaaaaccctggcgttacccaacttaatcgccttgcagcacatccccctttcgccagctggcgtaatagcgaagaggcccgcaccgatcgcccttcccaacagttgcgcagcctatacgtacggcagtttaaggtttacacctataaaagagagagccgttatcgtctgtttgtggatgtacagagtgatattattgacacgccggggcgacggatggtgatccccctggccagtgcacgtctgctgtcagataaagtctcccgtgaactttacccggtggtgcatatcggggatgaaagctggcgcatgatgaccaccgatatggccagtgtgccggtctccgttatcggggaagaagtggctgatctcagccaccgcgaaaatgacatcaaaaacgccattaacctgatgttctggggaatataaatgtcaggcatgagattatcaaaaaggatcttcacctagatccttttcacgtagaaagccagtccgcagaaacggtgctgaccccggatgaatgtcagctactgggctatctggacaagggaaaacgcaagcgcaaagagaaagcaggtagcttgcagtgggcttacatggcgatagctagactgggcggttttatggacagcaagcgaaccggaattgccagctggggcgccctctggtaaggttgggaagccctgcaaagtaaactggatggctttctcgccgccaaggatctgatggcgcaggggatcaagctctgatcaagagacaggatgaggatcgtttcgcatgattgaacaagatggattgcacgcaggttctccggccgcttgggtggagaggctattcggctatgactgggcacaacagacaatcggctgctctgatgccgccgtgttccggctgtcagcgcaggggcgcccggttctttttgtcaagaccgacctgtccggtgccctgaatgaactgcaagacgaggcagcgcggctatcgtggctggccacgacgggcgttccttgcgcagctgtgctcgacgttgtcactgaagcgggaagggactggctgctattgggcgaagtgccggggcaggatctcctgtcatctcaccttgctcctgccgagaaagtatccatcatggctgatgcaatgcggcggctgcatacgcttgatccggctacctgcccattcgaccaccaagcgaaacatcgcatcgagcgagcacgtactcggatggaagccggtcttgtcgatcaggatgatctggacgaagagcatcaggggctcgcgccagccgaactgttcgccaggctcaaggcgagcatgcccgacggcgaggatctcgtcgtgacccatggcgatgcctgcttgccgaatatcatggtggaaaatggccgcttttctggattcatcgactgtggccggctgggtgtggcggaccgctatcaggacatagcgttggctacccgtgatattgctgaagagcttggcggcgaatgggctgaccgcttcctcgtgctttacggtatcgccgctcccgattcgcagcgcatcgccttctatcgccttcttgacgagttcttctgaattattaacgcttacaatttcctgatgcggtattttctccttacgcatctgtgcggtatttcacaccgcatacaggtggcacttttcggggaaatgtgcgcggaacccctatttgtttatttttctaaatacattcaaatatgtatccgctcatgagacaataaccctgataaatgcttcaataatagcacgtgaggagggccaccatggccaagttgaccagtgccgttccggtgctcaccgcgcgcgacgtcgccggagcggtcgagttctggaccgaccggctcgggttctcccgggacttcgtggaggacgacttcgccggtgtggtccgggacgacgtgaccctgttcatcagcgcggtccaggaccaggtggtgccggacaacaccctggcctgggtgtgggtgcgcggcctggacgagctgtacgccgagtggtcggaggtcgtgtccacgaacttccgggacgcctccgggccggccatgaccgagatcggcgagcagccgtgggggcgggagttcgccctgcgcgacccggccggcaactgcgtgcacttcgtggccgaggagcaggactgacacgtgctaaaacttcatttttaatttaaaaggatctaggtgaagatcctttttgataatctcatgaccaaaatcccttaacgtgagttttcgttccactgagcgtcagaccccgtagaaaagatcaaaggatcttcttgagatcctttttttctgcgcgtaatctgctgcttgcaaacaaaaaaaccaccgctaccagcggtggtttgtttgccggatcaagagctaccaactctttttccgaaggtaactggcttcagcagagcgcagataccaaatactgtccttctagtgtagccgtagttaggccaccacttcaagaactctgtagcaccgcctacatacctcgctctgctaatcctgttaccagtggctgctgccagtggcgataagtcgtgtcttaccgggttggactcaagacgatagttaccggataaggcgcagcggtcgggctgaacggggggttcgtgcacacagcccagcttggagcgaacgacctacaccgaactgagatacctacagcgtgagctatgagaaagcgccacgcttcccgaagggagaaaggcggacaggtatccggtaagcggcagggtcggaacaggagagcgcacgagggagcttccagggggaaacgcctggtatctttatagtcctgtcgggtttcgccacctctgacttgagcgtcgatttttgtgatgctcgtcaggggggcggagcctatggaaaaacgccagcaacgcggcctttttacggttcctgggcttttgctggccttttgctcacatgttctttcctgcgttatcccctgattctgtggataaccgtattaccgcctttgagtgagctgataccgctcgccgcagccgaacgaccgagcgcagcgagtcagtgagcgaggaagcggaagagcgcccaatacgcaaaccgcctctccccgcgcgttggccgattcattaatgcagctggcacgacaggtttcccgactggaaagcgggcagtgagcgcaacgcaattaatgtgagttagctcactcattaggcaccccaggctttacactttatgcttccggctcgtatgttgtgtggaattgtgagcggataacaatttcacacaggaaacagctatgaccatgattacgccaagctatttaggtgacgcgttagaatactcaagctatgcatcaagcttggtaccgagctcg

SEQ ID NO: 18 - DNA, 4330 bp, Artificial Sequence
  vector KS294
agcttggaattcgggatctgagtctagaaatccgtcaacatggtggagcacgacactctcgtctactccaagaatatcaaagatacagtctcagaagaccaaagggctattgagacttttcaacaaagggtaatatcgggaaacctcctcggattccattgcccagctatctgtcacttcatcaaaaggacagtagaaaaggaaggtggcacctacaaatgccatcattgcgataaaggaaaggctatcgttcaagatgcctctgccgacagtggtcccaaagatggacccccacccacgaggagcatcgtggaaaaagaagacgttccaaccacgtcttcaaagcaagtggattgatgtgatgatcctatgcgtatggtatgacgtgtgttcaagatgatgacttcaaacctacctatgacgtatggtatgaacgtgtgtcgactgatgacttagatccactcgagcggctataaatacgtacctacgcaccctgcgctaccatccctagagctgcagcttatttttacaacaattaccaacaacaacaaacaacaaacaacattacaattactatttacaattacagtcgacccgggatcgtacctctagggtggcggccgcaagtatgaactaaaatgcatgtaggtgtaagagctcatggagagcatggaatattgtatccgaccatgtaacagtataataactgagctccatctcacttcttctatgaataaacaaaggatgttatgatatattaacactctatctatgcaccttattgttctatgataaatttcctcttattattataaatcatctgaatcgtgacggcttatggaatgcttcaaatagtacaaaaacaaatgtgtactataagactttctaaacaattctaaccttagcattgtgaacgagacataagtgttaagaagacataacaattataatggaagaagtttgtctccatttatatattatatattacccacttatgtattatattaggatgttaaggagacataacaattataaagagagaagtttgtatccatttatatattatatactacccatttatatattatacttatccacttatttaatgtctttataaggtttgatccatgatatttctaatattttagttgatatgtatatgaaagggtactatttgaactctcttactctgtataaaggttggatcatccttaaagtgggtctatttaattttattgcttcttacagataaaaaaaaaattatgagttggtttgataaaatattgaaggatttaaaataataataaataacatataatatatgtatataaatttattataatataacatttatctataaaaaagtaaatattgtcataaatctatacaatcgtttagccttgctggacgaatctcaattatttaaacgagagtaaacatatttgactttttggttatttaacaaattattatttaacactatatgaaatttttttttttatcagcaaagaataaaattaaattaagaaggacaatggtgtcccaatccttatacaaccaacttccacaagaaagtcaagtcagagacaacaaaaaaacaagcaaaggaaattttttaatttgagttgtcttgtttgctgcataatttatgcagtaaaacactacacataacccttttagcagtagagcaatggttgaccgtgtgcttagcttcttttattttatttttttatcagcaaagaataaataaaataaaatgagacacttcagggatgtttcaacaagctctagactggaattcgtcgacggcgcgcccgatcatccggatatagttcctcctttcagcaaaaaacccctcaagacccgtttagaggccccaaggggttatgctagttattgctcagcggtggcagcagccaactcagcttcctttcgggctttgttagcagccggatcgatccaagctgtacctcactattcctttgccctcggacgagtgctggggcgtcggtttccactatcggcgagtacttctacacagccatcggtccagacggccgcgcttctgcgggcgatttgtgtacgcccgacagtcccggctccggatcggacgattgcgtcgcatcgaccctgcgcccaagctgcatcatcgaaattgccgtcaaccaagctctgatagagttggtcaagaccaatgcggagcatatacgcccggagccgcggcgatcctgcaagctccggatgcctccgctcgaagtagcgcgtctgctgctccatacaagccaaccacggcctccagaagaagatgttggcgacctcgtattgggaatccccgaacatcgcctcgctccagtcaatgaccgctgttatgcggccattgtccgtcaggacattgttggagccgaaatccgcgtgcacgaggtgccggacttcggggcagtcctcggcccaaagcatcagctcatcgagagcctgcgcgacggacgcactgacggtgtcgtccatcacagtttgccagtgatacacatggggatcagcaatcgcgcatatgaaatcacgccatgtagtgtattgaccgattccttgcggtccgaatgggccgaacccgctcgtctggctaagatcggccgcagcgatcgcatccatagcctccgcgaccggctgcagaacagcgggcagttcggtttcaggcaggtcttgcaacgtgacaccctgtgcacggcgggagatgcaataggtcaggctctcgctgaattccccaatgtcaagcacttccggaatcgggagcgcggccgatgcaaagtgccgataaacataacgatctttgtagaaaccatcggcgcagctatttacccgcaggacatatccacgccctcctacatcgaagctgaaagcacgagattcttcgccctccgagagctgcatcaggtcggagacgctgtcgaacttttcgatcagaaacttctcgacagacgtcgcggtgagttcaggcttttccatgggtatatctccttcttaaagttaaacaaaattatttctagagggaaaccgttgtggtctccctatagtgagtcgtattaatttcgcgggatcgagatctgatcaacctgcattaatgaatcggccaacgcgcggggagaggcggtttgcgtattgggcgctcttccgcttcctcgctcactgactcgctgcgctcggtcgttcggctgcggcgagcggtatcagctcactcaaaggcggtaatacggttatccacagaatcaggggataacgcaggaaagaacatgtgagcaaaaggccagcaaaaggccaggaaccgtaaaaaggccgcgttgctggcgtttttccataggctccgcccccctgacgagcatcacaaaaatcgacgctcaagtcagaggtggcgaaacccgacaggactataaagataccaggcgtttccccctggaagctccctcgtgcgctctcctgttccgaccctgccgcttaccggatacctgtccgcctttctcccttcgggaagcgtggcgctttctcaatgctcacgctgtaggtatctcagttcggtgtaggtcgttcgctccaagctgggctgtgtgcacgaaccccccgttcagcccgaccgctgcgccttatccggtaactatcgtcttgagtccaacccggtaagacacgacttatcgccactggcagcagccactggtaacaggattagcagagcgaggtatgtaggcggtgctacagagttcttgaagtggtggcctaactacggctacactagaaggacagtatttggtatctgcgctctgctgaagccagttaccttcggaaaaagagttggtagctcttgatccggcaaacaaaccaccgctggtagcggtggtttttttgtttgcaagcagcagattacgcgcagaaaaaaaggatctcaagaagatcctttgatcttttctacggggtctgacgctcagtggaacgaaaactcacgttaagggattttggtcatgacattaacctataaaaataggcgtatcacgaggccctttcgtctcgcgcgtttcggtgatgacggtgaaaacctctgacacatgcagctcccggagacggtcacagcttgtctgtaagcggatgccgggagcagacaagcccgtcagggcgcgtcagcgggtgttggcgggtgtcggggctggcttaactatgcggcatcagagcagattgtactgagagtgcaccatatggacatattgtcgttagaacgcggctacaattaatacataaccttatgtatcatacacatacgatttaggtgacactatagaacggcgcgcca

SEQ ID NO: 19 - DNA, 5195 bp, Artificial Sequence
  vector pKR1142
ctagagggcccaattcgccctatagtgagtcgtattacaattcactggccgtcgttttacaacgtcgtgactgggaaaaccctggcgttacccaacttaatcgccttgcagcacatccccctttcgccagctggcgtaatagcgaagaggcccgcaccgatcgcccttcccaacagttgcgcagcctatacgtacggcagtttaaggtttacacctataaaagagagagccgttatcgtctgtttgtggatgtacagagtgatattattgacacgccggggcgacggatggtgatccccctggccagtgcacgtctgctgtcagataaagtctcccgtgaactttacccggtggtgcatatcggggatgaaagctggcgcatgatgaccaccgatatggccagtgtgccggtctccgttatcggggaagaagtggctgatctcagccaccgcgaaaatgacatcaaaaacgccattaacctgatgttctggggaatataaatgtcaggcatgagattatcaaaaaggatcttcacctagatccttttcacgtagaaagccagtccgcagaaacggtgctgaccccggatgaatgtcagctactgggctatctggacaagggaaaacgcaagcgcaaagagaaagcaggtagcttgcagtgggcttacatggcgatagctagactgggcggttttatggacagcaagcgaaccggaattgccagctggggcgccctctggtaaggttgggaagccctgcaaagtaaactggatggctttctcgccgccaaggatctgatggcgcaggggatcaagctctgatcaagagacaggatgaggatcgtttcgcatgattgaacaagatggattgcacgcaggttctccggccgcttgggtggagaggctattcggctatgactgggcacaacagacaatcggctgctctgatgccgccgtgttccggctgtcagcgcaggggcgcccggttctttttgtcaagaccgacctgtccggtgccctgaatgaactgcaagacgaggcagcgcggctatcgtggctggccacgacgggcgttccttgcgcagctgtgctcgacgttgtcactgaagcgggaagggactggctgctattgggcgaagtgccggggcaggatctcctgtcatctcaccttgctcctgccgagaaagtatccatcatggctgatgcaatgcggcggctgcatacgcttgatccggctacctgcccattcgaccaccaagcgaaacatcgcatcgagcgagcacgtactcggatggaagccggtcttgtcgatcaggatgatctggacgaagagcatcaggggctcgcgccagccgaactgttcgccaggctcaaggcgagcatgcccgacggcgaggatctcgtcgtgacccatggcgatgcctgcttgccgaatatcatggtggaaaatggccgcttttctggattcatcgactgtggccggctgggtgtggcggaccgctatcaggacatagcgttggctacccgtgatattgctgaagagcttggcggcgaatgggctgaccgcttcctcgtgctttacggtatcgccgctcccgattcgcagcgcatcgccttctatcgccttcttgacgagttcttctgaattattaacgcttacaatttcctgatgcggtattttctccttacgcatctgtgcggtatttcacaccgcatacaggtggcacttttcggggaaatgtgcgcggaacccctatttgtttatttttctaaatacattcaaatatgtatccgctcatgagacaataaccctgataaatgcttcaataatagcacgtgaggagggccaccatggccaagttgaccagtgccgttccggtgctcaccgcgcgcgacgtcgccggagcggtcgagttctggaccgaccggctcgggttctcccgggacttcgtggaggacgacttcgccggtgtggtccgggacgacgtgaccctgttcatcagcgcggtccaggaccaggtggtgccggacaacaccctggcctgggtgtgggtgcgcggcctggacgagctgtacgccgagtggtcggaggtcgtgtccacgaacttccgggacgcctccgggccggccatgaccgagatcggcgagcagccgtgggggcgggagttcgccctgcgcgacccggccggcaactgcgtgcacttcgtggccgaggagcaggactgacacgtgctaaaacttcatttttaatttaaaaggatctaggtgaagatcctttttgataatctcatgaccaaaatcccttaacgtgagttttcgttccactgagcgtcagaccccgtagaaaagatcaaaggatcttcttgagatcctttttttctgcgcgtaatctgctgcttgcaaacaaaaaaaccaccgctaccagcggtggtttgtttgccggatcaagagctaccaactctttttccgaaggtaactggcttcagcagagcgcagataccaaatactgtccttctagtgtagccgtagttaggccaccacttcaagaactctgtagcaccgcctacatacctcgctctgctaatcctgttaccagtggctgctgccagtggcgataagtcgtgtcttaccgggttggactcaagacgatagttaccggataaggcgcagcggtcgggctgaacggggggttcgtgcacacagcccagcttggagcgaacgacctacaccgaactgagatacctacagcgtgagctatgagaaagcgccacgcttcccgaagggagaaaggcggacaggtatccggtaagcggcagggtcggaacaggagagcgcacgagggagcttccagggggaaacgcctggtatctttatagtcctgtcgggtttcgccacctctgacttgagcgtcgatttttgtgatgctcgtcaggggggcggagcctatggaaaaacgccagcaacgcggcctttttacggttcctgggcttttgctggccttttgctcacatgttctttcctgcgttatcccctgattctgtggataaccgtattaccgcctttgagtgagctgataccgctcgccgcagccgaacgaccgagcgcagcgagtcagtgagcgaggaagcggaagagcgcccaatacgcaaaccgcctctccccgcgcgttggccgattcattaatgcagctggcacgacaggtttcccgactggaaagcgggcagtgagcgcaacgcaattaatgtgagttagctcactcattaggcaccccaggctttacactttatgcttccggctcgtatgttgtgtggaattgtgagcggataacaatttcacacaggaaacagctatgaccatgattacgccaagctatttaggtgacgcgttagaatactcaagctatgcatcaagcttggtaccgagctcggatcctctagaaatccgtcaacatggtggagcacgacactctcgtctactccaagaatatcaaagatacagtctcagaagaccaaagggctattgagacttttcaacaaagggtaatatcgggaaacctcctcggattccattgcccagctatctgtcacttcatcaaaaggacagtagaaaaggaaggtggcacctacaaatgccatcattgcgataaaggaaaggctatcgttcaagatgcctctgccgacagtggtcccaaagatggacccccacccacgaggagcatcgtggaaaaagaagacgttccaaccacgtcttcaaagcaagtggattgatgtgatgatcctatgcgtatggtatgacgtgtgttcaagatgatgacttcaaacctacctatgacgtatggtatgaacgtgtgtcgactgatgacttagatccactcgagcggctataaatacgtacctacgcaccctgcgctaccatccctagagctgcagcttatttttacaacaattaccaacaacaacaaacaacaaacaacattacaattactatttacaattacagtcgacccgggatcgtacctctagggtggcggccgcaagtatgaactaaaatgcatgtaggtgtaagagctcatggagagcatggaatattgtatccgaccatgtaacagtataataactgagctccatctcacttcttctatgaataaacaaaggatgttatgatatattaacactctatctatgcaccttattgttctatgataaatttcctcttattattataaatcatctgaatcgtgacggcttatggaatgcttcaaatagtacaaaaacaaatgtgtactataagactttctaaacaattctaaccttagcattgtgaacgagacataagtgttaagaagacataacaattataatggaagaagtttgtctccatttatatattatatattacccacttatgtattatattaggatgttaaggagacataacaattataaagagagaagtttgtatccatttatatattatatactacccatttatatattatacttatccacttatttaatgtctttataaggtttgatccatgatatttctaatattttagttgatatgtatatgaaagggtactatttgaactctcttactctgtataaaggttggatcatccttaaagtgggtctatttaattttattgcttcttacagataaaaaaaaaattatgagttggtttgataaaatattgaaggatttaaaataataataaataacatataatatatgtatataaatttattataatataacatttatctataaaaaagtaaatattgtcataaatctatacaatcgtttagccttgctggacgaatctcaattatttaaacgagagtaaacatatttgactttttggttatttaacaaattattatttaacactatatgaaatttttttttttatcagcaaagaataaaattaaattaagaaggacaatggtgtcccaatccttatacaaccaacttccacaagaaagtcaagtcagagacaacaaaaaaacaagcaaaggaaattttttaatttgagttgtcttgtttgctgcataatttatgcagtaaaacactacacataacccttttagcagtagagcaatggttgaccgtgtgcttagcttcttttattttatttttttatcagcaaagaataaataaaataaaatgagacacttcagggatgtttcaacaagct

SEQ ID NO: 20 - DNA, 8314 bp, Artificial Sequence
  vector pKR1141
  misc_feature (6481)..(6481): n is a, c, g, or t
gatccgtcgacggcgcgcccgatcatccggatatagttcctcctttcagcaaaaaacccctcaagacccgtttagaggccccaaggggttatgctagttattgctcagcggtggcagcagccaactcagcttcctttcgggctttgttagcagccggatcgatccaagctgtacctcactattcctttgccctcggacgagtgctggggcgtcggtttccactatcggcgagtacttctacacagccatcggtccagacggccgcgcttctgcgggcgatttgtgtacgcccgacagtcccggctccggatcggacgattgcgtcgcatcgaccctgcgcccaagctgcatcatcgaaattgccgtcaaccaagctctgatagagttggtcaagaccaatgcggagcatatacgcccggagccgcggcgatcctgcaagctccggatgcctccgctcgaagtagcgcgtctgctgctccatacaagccaaccacggcctccagaagaagatgttggcgacctcgtattgggaatccccgaacatcgcctcgctccagtcaatgaccgctgttatgcggccattgtccgtcaggacattgttggagccgaaatccgcgtgcacgaggtgccggacttcggggcagtcctcggcccaaagcatcagctcatcgagagcctgcgcgacggacgcactgacggtgtcgtccatcacagtttgccagtgatacacatggggatcagcaatcgcgcatatgaaatcacgccatgtagtgtattgaccgattccttgcggtccgaatgggccgaacccgctcgtctggctaagatcggccgcagcgatcgcatccatagcctccgcgaccggctgcagaacagcgggcagttcggtttcaggcaggtcttgcaacgtgacaccctgtgcacggcgggagatgcaataggtcaggctctcgctgaattccccaatgtcaagcacttccggaatcgggagcgcggccgatgcaaagtgccgataaacataacgatctttgtagaaaccatcggcgcagctatttacccgcaggacatatccacgccctcctacatcgaagctgaaagcacgagattcttcgccctccgagagctgcatcaggtcggagacgctgtcgaacttttcgatcagaaacttctcgacagacgtcgcggtgagttcaggcttttccatgggtatatctccttcttaaagttaaacaaaattatttctagagggaaaccgttgtggtctccctatagtgagtcgtattaatttcgcgggatcgagatcgatccaattccaatcccacaaaaatctgagcttaacagcacagttgctcctctcagagcagaatcgggtattcaacaccctcatatcaactactacgttgtgtataacggtccacatgccggtatatacgatgactggggttgtacaaaggcggcaacaaacggcgttcccggagttgcacacaagaaatttgccactattacagaggcaagagcagcagctgacgcgtacacaacaagtcagcaaacagacaggttgaacttcatccccaaaggagaagctcaactcaagcccaagagctttgctaaggccctaacaagcccaccaaagcaaaaagcccactggctcacgctaggaaccaaaaggcccagcagtgatccagccccaaaagagatctcctttgccccggagattacaatggacgatttcctctatctttacgatctaggaaggaagttcgaaggtgaaggtgacgacactatgttcaccactgataatgagaaggttagcctcttcaatttcagaaagaatgctgacccacagatggttagagaggcctacgcagcaggtctcatcaagacgatctacccgagtaacaatctccaggagatcaaataccttcccaagaaggttaaagatgcagtcaaaagattcaggactaattgcatcaagaacacagagaaagacatatttctcaagatcagaagtactattccagtatggacgattcaaggcttgcttcataaaccaaggcaagtaatagagattggagtctctaaaaaggtagttcctactgaatctaaggccatgcatggagtctaagattcaaatcgaggatctaacagaactcgccgtgaagactggcgaacagttcatacagagtcttttacgactcaatgacaagaagaaaatcttcgtcaacatggtggagcacgacactctggtctactccaaaaatgtcaaagatacagtctcagaagaccaaagggctattgagacttttcaacaaaggataatttcgggaaacctcctcggattccattgcccagctatctgtcacttcatcgaaaggacagtagaaaaggaaggtggctcctacaaatgccatcattgcgataaaggaaaggctatcattcaagatgcctctgccgacagtggtcccaaagatggacccccacccacgaggagcatcgtggaaaaagaagacgttccaaccacgtcttcaaagcaagtggattgatgtgacatctccactgacgtaagggatgacgcacaatcccactatccttcgcaagacccttcctctatataaggaagttcatttcatttggagaggacacgctcgagctcatttctctattacttcagccataacaaaagaactcttttctcttcttattaaaccatgaaaaagcctgaactcaccgcgacgtctgtcgagaagtttctgatcgaaaagttcgacagcgtctccgacctgatgcagctctcggagggcgaagaatctcgtgctttcagcttcgatgtaggagggcgtggatatgtcctgcgggtaaatagctgcgccgatggtttctacaaagatcgttatgtttatcggcactttgcatcggccgcgctcccgattccggaagtgcttgacattggggaattcagcgagagcctgacctattgcatctcccgccgtgcacagggtgtcacgttgcaagacctgcctgaaaccgaactgcccgctgttctgcagccggtcgcggaggccatggatgcgatcgctgcggccgatcttagccagacgagcgggttcggcccattcggaccgcaaggaatcggtcaatacactacatggcgtgatttcatatgcgcgattgctgatccccatgtgtatcactggcaaactgtgatggacgacaccgtcagtgcgtccgtcgcgcaggctctcgatgagctgatgctttgggccgaggactgccccgaagtccggcacctcgtgcacgcggatttcggctccaacaatgtcctgacggacaatggccgcataacagcggtcattgactggagcgaggcgatgttcggggattcccaatacgaggtcgccaacatcttcttctggaggccgtggttggcttgtatggagcagcagacgcgctacttcgagcggaggcatccggagcttgcaggatcgccgcggctccgggcgtatatgctccgcattggtcttgaccaactctatcagagcttggttgacggcaatttcgatgatgcagcttgggcgcagggtcgatgcgacgcaatcgtccgatccggagccgggactgtcgggcgtacacaaatcgcccgcagaagcgcggccgtctggaccgatggctgtgtagaagtactcgccgatagtggaaaccgacgccccagcactcgtccgagggcaaaggaatagtgaggtacctaaagaaggagtgcgtcgaagcagatcgttcaaacatttggcaataaagtttcttaagattgaatcctgttgccggtcttgcgatgattatcatataatttctgttgaattacgttaagcatgtaataattaacatgtaatgcatgacgttatttatgagatgggtttttatgattagagtcccgcaattatacatttaatacgcgatagaaaacaaaatatagcgcgcaaactaggataaattatcgcgcgcggtgtcatctatgttactagatcgatgtcgaatcgatcaacctgcattaatgaatcggccaacgcgcggggagaggcggtttgcgtattgggcgctcttccgcttcctcgctcactgactcgctgcgctcggtcgttcggctgcggcgagcggtatcagctcactcaaaggcggtaatacggttatccacagaatcaggggataacgcaggaaagaacatgtgagcaaaaggccagcaaaaggccaggaaccgtaaaaaggccgcgttgctggcgtttttccataggctccgcccccctgacgagcatcacaaaaatcgacgctcaagtcagaggtggcgaaacccgacaggactataaagataccaggcgtttccccctggaagctccctcgtgcgctctcctgttccgaccctgccgcttaccggatacctgtccgcctttctcccttcgggaagcgtggcgctttctcaatgctcacgctgtaggtatctcagttcggtgtaggtcgttcgctccaagctgggctgtgtgcacgaaccccccgttcagcccgaccgctgcgccttatccggtaactatcgtcttgagtccaacccggtaagacacgacttatcgccactggcagcagccactggtaacaggattagcagagcgaggtatgtaggcggtgctacagagttcttgaagtggtggcctaactacggctacactagaaggacagtatttggtatctgcgctctgctgaagccagttaccttcggaaaaagagttggtagctcttgatccggcaaacaaaccaccgctggtagcggtggtttttttgtttgcaagcagcagattacgcgcagaaaaaaaggatctcaagaagatcctttgatcttttctacggggtctgacgctcagtggaacgaaaactcacgttaagggattttggtcatgacattaacctataaaaataggcgtatcacgaggccctttcgtctcgcgcgtttcggtgatgacggtgaaaacctctgacacatgcagctcccggagacggtcacagcttgtctgtaagcggatgccgggagcagacaagcccgtcagggcgcgtcagcgggtgttggcgggtgtcggggctggcttaactatgcggcatcagagcagattgtactgagagtgcaccatatggacatattgtcgttagaacgcggctacaattaatacataaccttatgtatcatacacatacgatttaggtgacactatagaacggcgcgccaagcttggatctcctgcaggatctggccggccggatctcgtacggatcctcgaagagaagggttaataacacacttttttaacatttttaacacaaattttagttatttaaaaatttattaaaaaatttaaaataagaagaggaactctttaaataaatctaacttacaaaatttatgatttttaataagttttcaccaataaaaaatgtcataaaaatatgttaaaaagtatattatcaatattctctttatgataaataaaaagaaaaaaaaaataaaagttaagtgaaaatgagattgaagtgactttaggtgtgtataaatatatcaaccccgccaacaatttatttaatccaaatatattgaagtatattattccatagcctttatttatttatatatttattatataaaagctttatttgttctaggttgttcatgaaatatttttttggttttatctccgttgtaagaaaatcatgtgctttgtgtcgccactcactattgcagctttttcatgcattggtcagattgacggttgattgtatttttgttttttatggttttgtgttatgacttaagtcttcatctctttatctcttcatcaggtttgatggttacctaatatggtccatgggtacatgcatggttaaattaggtggccaactttgttgtgaacgatagaattttttttatattaagtaaactatttttatattatgaaataataataaaaaaaatattttatcattattaacaaaatcatattagttaatttgttaactctataataaaagaaatactgtaacattcacattacatggtaacatctttccaccctttcatttgttttttgtttgatgactttttttcttgtttaaatttatttcccttcttttaaatttggaatacattatcatcatatataaactaaaatactaaaaacaggattacacaaatgataaataataacacaaatatttataaatctagctgcaatatatttaaactagctatatcgatattgtaaaataaaactagctgcattgatactgataaaaaaatatcatgtgctttctggactgatgatgcagtatacttttgacattgcctttattttatttttcagaaaagctttcttagttctgggttcttcattatttgtttcccatctccattgtgaattgaatcatttgcttcgtgtcacaaatacaatttagntaggtacatgcattggtcagattcacggtttattatgtcatgacttaagttcatggtagtacattacctgccacgcatgcattatattggttagatttgataggcaaatttggttgtcaacaatataaatataaataatgtttttatattacgaaataacagtgatcaaaacaaacagttttatctttattaacaagattttgtttttgtttgatgacgttttttaatgtttacgctttcccccttcttttgaatttagaacactttatcatcataaaatcaaatactaaaaaaattacatatttcataaataataacacaaatatttttaaaaaatctgaaataataatgaacaatattacatattatcacgaaaattcattaataaaaatattatataaataaaatgtaatagtagttatatgtaggaaaaaagtactgcacgcataatatatacaaaaagattaaaatgaactattataaataataacactaaattaatggtgaatcatatcaaaataatgaaaaagtaaataaaatttgtaattaacttctatatgtattacacacacaaataataaataatagtaaaaaaaattatgataaatatttaccatctcataagatatttaaaataatgataaaaatatagattattttttatgcaactagctagccaaaaagagaacacgggtatatataaaaagagtacctttaaattctactgtacttcctttattcctgacgtttttatatcaagtggacatacgtgaagattttaattatcagtctaaatatttcattagcacttaatacttttctgttttattcctatcctataagtagtcccgattctcccaacattgcttattcacacaactaactaagaaagtcttccatagccccccaagcggcccatggcctcctccgaggacgtcatcaaggagttcatgcgcttcaaggtgcgcatggagggctccgtgaacggccacgagttcgagatcgagggcgagggcgagggccgcccctacgagggcacccagaccgccaagctgaaggtgaccaagggcggccccctgcccttcgcctgggacatcctgtccccccagttccagtacggctccaaggtgtacgtgaagcaccccgccgacatccccgactacaagaagctgtccttccccgagggcttcaagtgggagcgcgtgatgaacttcgaggacggcggcgtggtgaccgtgacccaggactcctccctgcaggacggctccttcatctacaaggtgaagttcatcggcgtgaacttcccctccgacggccccgtaatgcagaagaagactatgggctgggaggcctccaccgagcgcctgtacccccgcgacggcgtgctgaagggcgagatccacaaggccctgaagctgaaggacggcggccactacctggtggagttcaagtccatctacatggccaagaagcccgtgcagctgcccggctactactacgtggactccaagctggacatcacctcccacaacgaggactacaccatcgtggagcagtacgagcgcgccgagggccgccaccacctgttcctgtagcggccggccgcgacacaagtgtgagagtactaaataaatgctttggttgtacgaaatcattacactaaataaaataatcaaagcttatatatgccttccgctaaggccgaatgcaaagaaattggttctttctcgttatcttttgccacttttactagtacgtattaattactacttaatcatctttgtttacggctcattatatccgtcgacggcgcgggccgctctagaactagtg

SEQ ID NO: 21 - DNA, 35 bp, Artificial Sequence
  PCR primer SuSy-5
tcctgcaggtctactctttacatgttctttactcc

SEQ ID NO: 22 - DNA, 34 bp, Artificial Sequence
  PCR primer SuSy-3
agcggccgcgattttttctcagaggcaaaaacac

SEQ ID NO: 23 - DNA, 5531 bp, Artificial Sequence
  vector pLF122
cctgaattctgcagatatccatcacactggcggccgctcgagcatgcatctagagggcccaattcgccctatagtgagtcgtattacaattcactggccgtcgttttacaacgtcgtgactgggaaaaccctggcgttacccaacttaatcgccttgcagcacatccccctttcgccagctggcgtaatagcgaagaggcccgcaccgatcgcccttcccaacagttgcgcagcctatacgtacggcagtttaaggtttacacctataaaagagagagccgttatcgtctgtttgtggatgtacagagtgatattattgacacgccggggcgacggatggtgatccccctggccagtgcacgtctgctgtcagataaagtctcccgtgaactttacccggtggtgcatatcggggatgaaagctggcgcatgatgaccaccgatatggccagtgtgccggtctccgttatcggggaagaagtggctgatctcagccaccgcgaaaatgacatcaaaaacgccattaacctgatgttctggggaatataaatgtcaggcatgagattatcaaaaaggatcttcacctagatccttttcacgtagaaagccagtccgcagaaacggtgctgaccccggatgaatgtcagctactgggctatctggacaagggaaaacgcaagcgcaaagagaaagcaggtagcttgcagtgggcttacatggcgatagctagactgggcggttttatggacagcaagcgaaccggaattgccagctggggcgccctctggtaaggttgggaagccctgcaaagtaaactggatggctttctcgccgccaaggatctgatggcgcaggggatcaagctctgatcaagagacaggatgaggatcgtttcgcatgattgaacaagatggattgcacgcaggttctccggccgcttgggtggagaggctattcggctatgactgggcacaacagacaatcggctgctctgatgccgccgtgttccggctgtcagcgcaggggcgcccggttctttttgtcaagaccgacctgtccggtgccctgaatgaactgcaagacgaggcagcgcggctatcgtggctggccacgacgggcgttccttgcgcagctgtgctcgacgttgtcactgaagcgggaagggactggctgctattgggcgaagtgccggggcaggatctcctgtcatctcaccttgctcctgccgagaaagtatccatcatggctgatgcaatgcggcggctgcatacgcttgatccggctacctgcccattcgaccaccaagcgaaacatcgcatcgagcgagcacgtactcggatggaagccggtcttgtcgatcaggatgatctggacgaagagcatcaggggctcgcgccagccgaactgttcgccaggctcaaggcgagcatgcccgacggcgaggatctcgtcgtgacccatggcgatgcctgcttgccgaatatcatggtggaaaatggccgcttttctggattcatcgactgtggccggctgggtgtggcggaccgctatcaggacatagcgttggctacccgtgatattgctgaagagcttggcggcgaatgggctgaccgcttcctcgtgctttacggtatcgccgctcccgattcgcagcgcatcgccttctatcgccttcttgacgagttcttctgaattattaacgcttacaatttcctgatgcggtattttctccttacgcatctgtgcggtatttcacaccgcatacaggtggcacttttcggggaaatgtgcgcggaacccctatttgtttatttttctaaatacattcaaatatgtatccgctcatgagacaataaccctgataaatgcttcaataatagcacgtgaggagggccaccatggccaagttgaccagtgccgttccggtgctcaccgcgcgcgacgtcgccggagcggtcgagttctggaccgaccggctcgggttctcccgggacttcgtggaggacgacttcgccggtgtggtccgggacgacgtgaccctgttcatcagcgcggtccaggaccaggtggtgccggacaacaccctggcctgggtgtgggtgcgcggcctggacgagctgtacgccgagtggtcggaggtcgtgtccacgaacttccgggacgcctccgggccggccatgaccgagatcggcgagcagccgtgggggcgggagttcgccctgcgcgacccggccggcaactgcgtgcacttcgtggccgaggagcaggactgacacgtgctaaaacttcatttttaatttaaaaggatctaggtgaagatcctttttgataatctcatgaccaaaatcccttaacgtgagttttcgttccactgagcgtcagaccccgtagaaaagatcaaaggatcttcttgagatcctttttttctgcgcgtaatctgctgcttgcaaacaaaaaaaccaccgctaccagcggtggtttgtttgccggatcaagagctaccaactctttttccgaaggtaactggcttcagcagagcgcagataccaaatactgtccttctagtgtagccgtagttaggccaccacttcaagaactctgtagcaccgcctacatacctcgctctgctaatcctgttaccagtggctgctgccagtggcgataagtcgtgtcttaccgggttggactcaagacgatagttaccggataaggcgcagcggtcgggctgaacggggggttcgtgcacacagcccagcttggagcgaacgacctacaccgaactgagatacctacagcgtgagctatgagaaagcgccacgcttcccgaagggagaaaggcggacaggtatccggtaagcggcagggtcggaacaggagagcgcacgagggagcttccagggggaaacgcctggtatctttatagtcctgtcgggtttcgccacctctgacttgagcgtcgatttttgtgatgctcgtcaggggggcggagcctatggaaaaacgccagcaacgcggcctttttacggttcctgggcttttgctggccttttgctcacatgttctttcctgcgttatcccctgattctgtggataaccgtattaccgcctttgagtgagctgataccgctcgccgcagccgaacgaccgagcgcagcgagtcagtgagcgaggaagcggaagagcgcccaatacgcaaaccgcctctccccgcgcgttggccgattcattaatgcagctggcacgacaggtttcccgactggaaagcgggcagtgagcgcaacgcaattaatgtgagttagctcactcattaggcaccccaggctttacactttatgcttccggctcgtatgttgtgtggaattgtgagcggataacaatttcacacaggaaacagctatgaccatgattacgccaagctatttaggtgacgcgttagaatactcaagctatgcatcaagcttggtaccgagctcggatccactagtaacggccgccagtgtgctggaattcaggtcctgcaggtctactctttacatgttctttactccgtctcaaaatttcctttttttgttggctctctccgaacgagttggagaaatcgttaaccctaatcgaagatctagattcctctacatacgtttgatctctctctcagtatggattacaaagcgccaaggagatactactcacacggagttgttgcgagacagcaagatttcgcaacagatatagttacgagaagaagaccttatgtcccttacgaccgtccaaataagttttcaaggagtctggtttggacgtcaaaagagtacaaatcacccgagggcaataatatgccaaggaccaatgatgtgtcaccgaaaccaccagttttaggtttggcgaggaagaatgctgcttgtgggccaatgagatcttctagtctcagaaaatgggtatgtaagtattggaaagatggaaagtgcaagaggggtgagcagtgccagttcttacactcttggtcttgtttccctggattggccatggtagcttctcttgaagggcacaataaggaactaaaggggatcgctctccctgagggttcagataaactcttttcagtcagtattgatggtacattgcgagtttgggactgcaattctggtcagtgtgtacattccatcaaccttgacgcagaagcagggtctctaatcagtgaaggcccttgggttttccttggcttgccaaacgctataaaggcttttaacgttcaaaccagtcaagatttgcatcttcaagcagcaggggtggttggtcaggtgaatgcaatgactattgcaaacggaatgctttttgctggaacaagttctggtagtatcttagtctggaaagctactacagactctgagtctgatccattcaaatacttgacatctcttgagggacatagtggtgaagtcacttgttttgctgttggaggtcaaatgctatactctggttctgtcgataaaacaatcaagatgtgggatctcaacaccctgcaatgtataatgaccctgaagcaacataccggcactgtcacttcactcttatgttgggataaatgtttgatatcgtcttccttggatgggaccataaaagtttgggcttattctgaaaacggaatcttgaaagttgttcaaactcgcagacaagaacagagtagtgttcatgctctttctggtatgcatgatgcagaagccaaaccgataatattctgctcttaccaaaacggaaccgttggcattttcgacctaccatcttttcaagaaagaggaaggatgttctctacgcacacgatcgccacactcacaattggtcctcaaggattgttattcagtggagacgagagtggtaacttgcgtgtatggaccttagctgctggcaacaaagtttagtcttttcgactaaagaattctgatttaattttgtggtttatatgttgagttaactgttaagagagttttattttgtaataggtgtatcagtcaataaacaatctttgtatcaaccaaatgtaatttttctcgttaattcgatttcagagtttttactttaagataaacaaactctttcacacatcatttaatgaaagtggagaagcttaaaaaacaaacaaagaaactgatccatttttggcgggtcttcttctactcttattcatatgtgttaacgaactatagcgtaaaattcagagcaagcgatctccgatttgaacgtggctatcaccggaggcccaccactacgggcgatacgctctaagtgaggattaaagtgctctggtggtgacgttgaagaaactcgcccatggtttttgttatctctgcagccaagtgtcgttctttcttcgccacttctcatcaagctacagtgaatttaaaaatggcgtctttctttgatctcgtatacataagctggattggtttcttaaacaaattcctctccttttgggtcttctgggtttgccttgtaagtgtttgtgtttttgcctctgagaaaaaatcgcggccgct

SEQ ID NO: 24 - DNA, 6644 bp, Artificial Sequence
  vector pKR1155
ggccgcaagtatgaactaaaatgcatgtaggtgtaagagctcatggagagcatggaatattgtatccgaccatgtaacagtataataactgagctccatctcacttcttctatgaataaacaaaggatgttatgatatattaacactctatctatgcaccttattgttctatgataaatttcctcttattattataaatcatctgaatcgtgacggcttatggaatgcttcaaatagtacaaaaacaaatgtgtactataagactttctaaacaattctaaccttagcattgtgaacgagacataagtgttaagaagacataacaattataatggaagaagtttgtctccatttatatattatatattacccacttatgtattatattaggatgttaaggagacataacaattataaagagagaagtttgtatccatttatatattatatactacccatttatatattatacttatccacttatttaatgtctttataaggtttgatccatgatatttctaatattttagttgatatgtatatgaaagggtactatttgaactctcttactctgtataaaggttggatcatccttaaagtgggtctatttaattttattgcttcttacagataaaaaaaaaattatgagttggtttgataaaatattgaaggatttaaaataataataaataacatataatatatgtatataaatttattataatataacatttatctataaaaaagtaaatattgtcataaatctatacaatcgtttagccttgctggacgaatctcaattatttaaacgagagtaaacatatttgactttttggttatttaacaaattattatttaacactatatgaaatttttttttttatcagcaaagaataaaattaaattaagaaggacaatggtgtcccaatccttatacaaccaacttccacaagaaagtcaagtcagagacaacaaaaaaacaagcaaaggaaattttttaatttgagttgtcttgtttgctgcataatttatgcagtaaaacactacacataacccttttagcagtagagcaatggttgaccgtgtgcttagcttcttttattttatttttttatcagcaaagaataaataaaataaaatgagacacttcagggatgtttcaacaagctctagagggcccaattcgccctatagtgagtcgtattacaattcactggccgtcgttttacaacgtcgtgactgggaaaaccctggcgttacccaacttaatcgccttgcagcacatccccctttcgccagctggcgtaatagcgaagaggcccgcaccgatcgcccttcccaacagttgcgcagcctatacgtacggcagtttaaggtttacacctataaaagagagagccgttatcgtctgtttgtggatgtacagagtgatattattgacacgccggggcgacggatggtgatccccctggccagtgcacgtctgctgtcagataaagtctcccgtgaactttacccggtggtgcatatcggggatgaaagctggcgcatgatgaccaccgatatggccagtgtgccggtctccgttatcggggaagaagtggctgatctcagccaccgcgaaaatgacatcaaaaacgccattaacctgatgttctggggaatataaatgtcaggcatgagattatcaaaaaggatcttcacctagatccttttcacgtagaaagccagtccgcagaaacggtgctgaccccggatgaatgtcagctactgggctatctggacaagggaaaacgcaagcgcaaagagaaagcaggtagcttgcagtgggcttacatggcgatagctagactgggcggttttatggacagcaagcgaaccggaattgccagctggggcgccctctggtaaggttgggaagccctgcaaagtaaactggatggctttctcgccgccaaggatctgatggcgcaggggatcaagctctgatcaagagacaggatgaggatcgtttcgcatgattgaacaagatggattgcacgcaggttctccggccgcttgggtggagaggctattcggctatgactgggcacaacagacaatcggctgctctgatgccgccgtgttccggctgtcagcgcaggggcgcccggttctttttgtcaagaccgacctgtccggtgccctgaatgaactgcaagacgaggcagcgcggctatcgtggctggccacgacgggcgttccttgcgcagctgtgctcgacgttgtcactgaagcgggaagggactggctgctattgggcgaagtgccggggcaggatctcctgtcatctcaccttgctcctgccgagaaagtatccatcatggctgatgcaatgcggcggctgcatacgcttgatccggctacctgcccattcgaccaccaagcgaaacatcgcatcgagcgagcacgtactcggatggaagccggtcttgtcgatcaggatgatctggacgaagagcatcaggggctcgcgccagccgaactgttcgccaggctcaaggcgagcatgcccgacggcgaggatctcgtcgtgacccatggcgatgcctgcttgccgaatatcatggtggaaaatggccgcttttctggattcatcgactgtggccggctgggtgtggcggaccgctatcaggacatagcgttggctacccgtgatattgctgaagagcttggcggcgaatgggctgaccgcttcctcgtgctttacggtatcgccgctcccgattcgcagcgcatcgccttctatcgccttcttgacgagttcttctgaattattaacgcttacaatttcctgatgcggtattttctccttacgcatctgtgcggtatttcacaccgcatacaggtggcacttttcggggaaatgtgcgcggaacccctatttgtttatttttctaaatacattcaaatatgtatccgctcatgagacaataaccctgataaatgcttcaataatagcacgtgaggagggccaccatggccaagttgaccagtgccgttccggtgctcaccgcgcgcgacgtcgccggagcggtcgagttctggaccgaccggctcgggttctcccgggacttcgtggaggacgacttcgccggtgtggtccgggacgacgtgaccctgttcatcagcgcggtccaggaccaggtggtgccggacaacaccctggcctgggtgtgggtgcgcggcctggacgagctgtacgccgagtggtcggaggtcgtgtccacgaacttccgggacgcctccgggccggccatgaccgagatcggcgagcagccgtgggggcgggagttcgccctgcgcgacccggccggcaactgcgtgcacttcgtggccgaggagcaggactgacacgtgctaaaacttcatttttaatttaaaaggatctaggtgaagatcctttttgataatctcatgaccaaaatcccttaacgtgagttttcgttccactgagcgtcagaccccgtagaaaagatcaaaggatcttcttgagatcctttttttctgcgcgtaatctgctgcttgcaaacaaaaaaaccaccgctaccagcggtggtttgtttgccggatcaagagctaccaactctttttccgaaggtaactggcttcagcagagcgcagataccaaatactgtccttctagtgtagccgtagttaggccaccacttcaagaactctgtagcaccgcctacatacctcgctctgctaatcctgttaccagtggctgctgccagtggcgataagtcgtgtcttaccgggttggactcaagacgatagttaccggataaggcgcagcggtcgggctgaacggggggttcgtgcacacagcccagcttggagcgaacgacctacaccgaactgagatacctacagcgtgagctatgagaaagcgccacgcttcccgaagggagaaaggcggacaggtatccggtaagcggcagggtcggaacaggagagcgcacgagggagcttccagggggaaacgcctggtatctttatagtcctgtcgggtttcgccacctctgacttgagcgtcgatttttgtgatgctcgtcaggggggcggagcctatggaaaaacgccagcaacgcggcctttttacggttcctgggcttttgctggccttttgctcacatgttctttcctgcgttatcccctgattctgtggataaccgtattaccgcctttgagtgagctgataccgctcgccgcagccgaacgaccgagcgcagcgagtcagtgagcgaggaagcggaagagcgcccaatacgcaaaccgcctctccccgcgcgttggccgattcattaatgcagctggcacgacaggtttcccgactggaaagcgggcagtgagcgcaacgcaattaatgtgagttagctcactcattaggcaccccaggctttacactttatgcttccggctcgtatgttgtgtggaattgtgagcggataacaatttcacacaggaaacagctatgaccatgattacgccaagctatttaggtgacgcgttagaatactcaagctatgcatcaagcttggtaccgagctcggatccactagtaacggccgccagtgtgctggaattcaggtcctgcaggtctactctttacatgttctttactccgtctcaaaatttcctttttttgttggctctctccgaacgagttggagaaatcgttaaccctaatcgaagatctagattcctctacatacgtttgatctctctctcagtatggattacaaagcgccaaggagatactactcacacggagttgttgcgagacagcaagatttcgcaacagatatagttacgagaagaagaccttatgtcccttacgaccgtccaaataagttttcaaggagtctggtttggacgtcaaaagagtacaaatcacccgagggcaataatatgccaaggaccaatgatgtgtcaccgaaaccaccagttttaggtttggcgaggaagaatgctgcttgtgggccaatgagatcttctagtctcagaaaatgggtatgtaagtattggaaagatggaaagtgcaagaggggtgagcagtgccagttcttacactcttggtcttgtttccctggattggccatggtagcttctcttgaagggcacaataaggaactaaaggggatcgctctccctgagggttcagataaactcttttcagtcagtattgatggtacattgcgagtttgggactgcaattctggtcagtgtgtacattccatcaaccttgacgcagaagcagggtctctaatcagtgaaggcccttgggttttccttggcttgccaaacgctataaaggcttttaacgttcaaaccagtcaagatttgcatcttcaagcagcaggggtggttggtcaggtgaatgcaatgactattgcaaacggaatgctttttgctggaacaagttctggtagtatcttagtctggaaagctactacagactctgagtctgatccattcaaatacttgacatctcttgagggacatagtggtgaagtcacttgttttgctgttggaggtcaaatgctatactctggttctgtcgataaaacaatcaagatgtgggatctcaacaccctgcaatgtataatgaccctgaagcaacataccggcactgtcacttcactcttatgttgggataaatgtttgatatcgtcttccttggatgggaccataaaagtttgggcttattctgaaaacggaatcttgaaagttgttcaaactcgcagacaagaacagagtagtgttcatgctctttctggtatgcatgatgcagaagccaaaccgataatattctgctcttaccaaaacggaaccgttggcattttcgacctaccatcttttcaagaaagaggaaggatgttctctacgcacacgatcgccacactcacaattggtcctcaaggattgttattcagtggagacgagagtggtaacttgcgtgtatggaccttagctgctggcaacaaagtttagtcttttcgactaaagaattctgatttaattttgtggtttatatgttgagttaactgttaagagagttttattttgtaataggtgtatcagtcaataaacaatctttgtatcaaccaaatgtaatttttctcgttaattcgatttcagagtttttactttaagataaacaaactctttcacacatcatttaatgaaagtggagaagcttaaaaaacaaacaaagaaactgatccatttttggcgggtcttcttctactcttattcatatgtgttaacgaactatagcgtaaaattcagagcaagcgatctccgatttgaacgtggctatcaccggaggcccaccactacgggcgatacgctctaagtgaggattaaagtgctctggtggtgacgttgaagaaactcgcccatggtttttgttatctctgcagccaagtgtcgttctttcttcgccacttctcatcaagctacagtgaatttaaaaatggcgtctttctttgatctcgtatacataagctggattggtttcttaaacaaattcctctccttttgggtcttctgggtttgccttgtaagtgtttgtgtttttgcctctgagaaaaaatcgc

SEQ ID NO: 25 - DNA, 11736 bp, Artificial Sequence
  vector pKR1158
  misc_feature (7136)..(7136): n is a, c, g, or t
gtacgagatccggccggccagatcctgcaggagatccaagcttggcgcgccgttctatagtgtcacctaaatcgtatgtgtatgatacataaggttatgtattaattgtagccgcgttctaacgacaatatgtccatatggtgcactctcagtacaatctgctctgatgccgcatagttaagccagccccgacacccgccaacacccgctgacgcgccctgacgggcttgtctgctcccggcatccgcttacagacaagctgtgaccgtctccgggagctgcatgtgtcagaggttttcaccgtcatcaccgaaacgcgcgagacgaaagggcctcgtgatacgcctatttttataggttaatgtcatgaccaaaatcccttaacgtgagttttcgttccactgagcgtcagaccccgtagaaaagatcaaaggatcttcttgagatcctttttttctgcgcgtaatctgctgcttgcaaacaaaaaaaccaccgctaccagcggtggtttgtttgccggatcaagagctaccaactctttttccgaaggtaactggcttcagcagagcgcagataccaaatactgtccttctagtgtagccgtagttaggccaccacttcaagaactctgtagcaccgcctacatacctcgctctgctaatcctgttaccagtggctgctgccagtggcgataagtcgtgtcttaccgggttggactcaagacgatagttaccggataaggcgcagcggtcgggctgaacggggggttcgtgcacacagcccagcttggagcgaacgacctacaccgaactgagatacctacagcgtgagcattgagaaagcgccacgcttcccgaagggagaaaggcggacaggtatccggtaagcggcagggtcggaacaggagagcgcacgagggagcttccagggggaaacgcctggtatctttatagtcctgtcgggtttcgccacctctgacttgagcgtcgatttttgtgatgctcgtcaggggggcggagcctatggaaaaacgccagcaacgcggcctttttacggttcctggccttttgctggccttttgctcacatgttctttcctgcgttatcccctgattctgtggataaccgtattaccgcctttgagtgagctgataccgctcgccgcagccgaacgaccgagcgcagcgagtcagtgagcgaggaagcggaagagcgcccaatacgcaaaccgcctctccccgcgcgttggccgattcattaatgcaggttgatcgattcgacatcgatctagtaacatagatgacaccgcgcgcgataatttatcctagtttgcgcgctatattttgttttctatcgcgtattaaatgtataattgcgggactctaatcataaaaacccatctcataaataacgtcatgcattacatgttaattattacatgcttaacgtaattcaacagaaattatatgataatcatcgcaagaccggcaacaggattcaatcttaagaaactttattgccaaatgtttgaacgatctgcttcgacgcactccttctttaggtacctcactattcctttgccctcggacgagtgctggggcgtcggtttccactatcggcgagtacttctacacagccatcggtccagacggccgcgcttctgcgggcgatttgtgtacgcccgacagtcccggctccggatcggacgattgcgtcgcatcgaccctgcgcccaagctgcatcatcgaaattgccgtcaaccaagctctgatagagttggtcaagaccaatgcggagcatatacgcccggagccgcggcgatcctgcaagctccggatgcctccgctcgaagtagcgcgtctgctgctccatacaagccaaccacggcctccagaagaagatgttggcgacctcgtattgggaatccccgaacatcgcctcgctccagtcaatgaccgctgttatgcggccattgtccgtcaggacattgttggagccgaaatccgcgtgcacgaggtgccggacttcggggcagtcctcggcccaaagcatcagctcatcgagagcctgcgcgacggacgcactgacggtgtcgtccatcacagtttgccagtgatacacatggggatcagcaatcgcgcatatgaaatcacgccatgtagtgtattgaccgattccttgcggtccgaatgggccgaacccgctcgtctggctaagatcggccgcagcgatcgcatccatggcctccgcgaccggctgcagaacagcgggcagttcggtttcaggcaggtcttgcaacgtgacaccctgtgcacggcgggagatgcaataggtcaggctctcgctgaattccccaatgtcaagcacttccggaatcgggagcgcggccgatgcaaagtgccgataaacataacgatctttgtagaaaccatcggcgcagctatttacccgcaggacatatccacgccctcctacatcgaagctgaaagcacgagattcttcgccctccgagagctgcatcaggtcggagacgctgtcgaacttttcgatcagaaacttctcgacagacgtcgcggtgagttcaggctttttcatggtttaataagaagagaaaagagttcttttgttatggctgaagtaatagagaaatgagctcgagcgtgtcctctccaaatgaaatgaacttccttatatagaggaagggtcttgcgaaggatagtgggattgtgcgtcatcccttacgtcagtggagatgtcacatcaatccacttgctttgaagacgtggttggaacgtcttctttttccacgatgctcctcgtgggtgggggtccatctttgggaccactgtcggcagaggcatcttgaatgatagcctttcctttatcgcaatgatggcatttgtaggagccaccttccttttctactgtcctttcgatgaagtgacagatagctgggcaatggaatccgaggaggtttcccgaaattatcctttgttgaaaagtctcaatagccctttggtcttctgagactgtatctttgacatttttggagtagaccagagtgtcgtgctccaccatgttgacgaagattttcttcttgtcattgagtcgtaaaagactctgtatgaactgttcgccagtcttcacggcgagttctgttagatcctcgatttgaatcttagactccatgcatggccttagattcagtaggaactacctttttagagactccaatctctattacttgccttggtttatgaagcaagccttgaatcgtccatactggaatagtacttctgatcttgagaaatatgtctttctctgtgttcttgatgcaattagtcctgaatcttttgactgcatctttaaccttcttgggaaggtatttgatctcctggagattgttactcgggtagatcgtcttgatgagacctgctgcgtaggcctctctaaccatctgtgggtcagcattctttctgaaattgaagaggctaaccttctcattatcagtggtgaacatagtgtcgtcaccttcaccttcgaacttccttcctagatcgtaaagatagaggaaatcgtccattgtaatctccggggcaaaggagatctcttttggggctggatcactgctgggccttttggttcctagcgtgagccagtgggctttttgctttggtgggcttgttagggccttagcaaagctcttgggcttgagttgagcttctcctttggggatgaagttcaacctgtctgtttgctgacttgttgtgtacgcgtcagctgctgctcttgcctctgtaatagtggcaaatttcttgtgtgcaactccgggaacgccgtttgttgccgcctttgtacaaccccagtcatcgtatataccggcatgtggaccgttatacacaacgtagtagttgatatgagggtgttgaatacccgattctgctctgagaggagcaactgtgctgttaagctcagatttttgtgggattggaattggatcgatctcgatcccgcgaaattaatacgactcactatagggagaccacaacggtttccctctagaaataattttgtttaactttaagaaggagatatacccatggaaaagcctgaactcaccgcgacgtctgtcgagaagtttctgatcgaaaagttcgacagcgtctccgacctgatgcagctctcggagggcgaagaatctcgtgctttcagcttcgatgtaggagggcgtggatatgtcctgcgggtaaatagctgcgccgatggtttctacaaagatcgttatgtttatcggcactttgcatcggccgcgctcccgattccggaagtgcttgacattggggaattcagcgagagcctgacctattgcatctcccgccgtgcacagggtgtcacgttgcaagacctgcctgaaaccgaactgcccgctgttctgcagccggtcgcggaggctatggatgcgatcgctgcggccgatcttagccagacgagcgggttcggcccattcggaccgcaaggaatcggtcaatacactacatggcgtgatttcatatgcgcgattgctgatccccatgtgtatcactggcaaactgtgatggacgacaccgtcagtgcgtccgtcgcgcaggctctcgatgagctgatgctttgggccgaggactgccccgaagtccggcacctcgtgcacgcggatttcggctccaacaatgtcctgacggacaatggccgcataacagcggtcattgactggagcgaggcgatgttcggggattcccaatacgaggtcgccaacatcttcttctggaggccgtggttggcttgtatggagcagcagacgcgctacttcgagcggaggcatccggagcttgcaggatcgccgcggctccgggcgtatatgctccgcattggtcttgaccaactctatcagagcttggttgacggcaatttcgatgatgcagcttgggcgcagggtcgatgcgacgcaatcgtccgatccggagccgggactgtcgggcgtacacaaatcgcccgcagaagcgcggccgtctggaccgatggctgtgtagaagtactcgccgatagtggaaaccgacgccccagcactcgtccgagggcaaaggaatagtgaggtacagcttggatcgatccggctgctaacaaagcccgaaaggaagctgagttggctgctgccaccgctgagcaataactagcataaccccttggggcctctaaacgggtcttgaggggttttttgctgaaaggaggaactatatccggatgatcgggcgcgccgtcgacggatccactagttctagagcggcccgcgccgtcgacggatataatgagccgtaaacaaagatgattaagtagtaattaatacgtactagtaaaagtggcaaaagataacgagaaagaaccaatttctttgcattcggccttagcggaaggcatatataagctttgattattttatttagtgtaatgatttcgtacaaccaaagcatttatttagtactctcacacttgtgtcgcggccggccgctacaggaacaggtggtggcggccctcggcgcgctcgtactgctccacgatggtgtagtcctcgttgtgggaggtgatgtccagcttggagtccacgtagtagtagccgggcagctgcacgggcttcttggccatgtagatggacttgaactccaccaggtagtggccgccgtccttcagcttcagggccttgtggatctcgcccttcagcacgccgtcgcgggggtacaggcgctcggtggaggcctcccagcccatagtcttcttctgcattacggggccgtcggaggggaagttcacgccgatgaacttcaccttgtagatgaaggagccgtcctgcagggaggagtcctgggtcacggtcaccacgccgccgtcctcgaagttcatcacgcgctcccacttgaagccctcggggaaggacagcttcttgtagtcggggatgtcggcggggtgcttcacgtacaccttggagccgtactggaactggggggacaggatgtcccaggcgaagggcagggggccgcccttggtcaccttcagcttggcggtctgggtgccctcgtaggggcggccctcgccctcgccctcgatctcgaactcgtggccgttcacggagccctccatgcgcaccttgaagcgcatgaactccttgatgacgtcctcggaggaggccatgggccgcttggggggctatggaagactttcttagttagttgtgtgaataagcaatgttgggagaatcgggactacttataggataggaataaaacagaaaagtattaagtgctaatgaaatatttagactgataattaaaatcttcacgtatgtccacttgatataaaaacgtcaggaataaaggaagtacagtagaatttaaaggtactctttttatatatacccgtgttctctttttggctagctagttgcataaaaaataatctatatttttatcattattttaaatatcttatgagatggtaaatatttatcataattttttttactattatttattatttgtgtgtgtaatacatatagaagttaattacaaattttatttactttttcattattttgatatgattcaccattaatttagtgttattatttataatagttcattttaatctttttgtatatattatgcgtgcagtacttttttcctacatataactactattacattttatttatataatatttttattaatgaattttcgtgataatatgtaatattgttcattattatttcagattttttaaaaatatttgtgttattatttatgaaatatgtaatttttttagtatttgattttatgatgataaagtgttctaaattcaaaagaagggggaaagcgtaaacattaaaaaacgtcatcaaacaaaaacaaaatcttgttaataaagataaaactgtttgttttgatcactgttatttcgtaatataaaaacattatttatatttatattgttgacaaccaaatttgcctatcaaatctaaccaatataatgcatgcgtggcaggtaatgtactaccatgaacttaagtcatgacataataaaccgtgaatctgaccaatgcatgtacctanctaaattgtatttgtgacacgaagcaaatgattcaattcacaatggagatgggaaacaaataatgaagaacccagaactaagaaagcttttctgaaaaataaaataaaggcaatgtcaaaagtatactgcatcatcagtccagaaagcacatgatatttttttatcagtatcaatgcagctagttttattttacaatatcgatatagctagtttaaatatattgcagctagatttataaatatttgtgttattatttatcatttgtgtaatcctgtttttagtattttagtttatatatgatgataatgtattccaaatttaaaagaagggaaataaatttaaacaagaaaaaaagtcatcaaacaaaaaacaaatgaaagggtggaaagatgttaccatgtaatgtgaatgttacagtatttcttttattatagagttaacaaattaactaatatgattttgttaataatgataaaatattttttttattattatttcataatataaaaatagtttacttaatataaaaaaaattctatcgttcacaacaaagttggccacctaatttaaccatgcatgtacccatggaccatattaggtaaccatcaaacctgatgaagagataaagagatgaagacttaagtcataacacaaaaccataaaaaacaaaaatacaatcaaccgtcaatctgaccaatgcatgaaaaagctgcaatagtgagtggcgacacaaagcacatgattttcttacaacggagataaaaccaaaaaaatatttcatgaacaacctagaacaaataaagcttttatataataaatatataaataaataaaggctatggaataatatacttcaatatatttggattaaataaattgttggcggggttgatatatttatacacacctaaagtcacttcaatctcattttcacttaacttttattttttttttctttttatttatcataaagagaatattgataatatactttttaacatatttttatgacattttttattggtgaaaacttattaaaaatcataaattttgtaagttagatttatttaaagagttcctcttcttattttaaattttttaataaatttttaaataactaaaatttgtgttaaaaatgttaaaaaagtgtgttattaacccttctcttcgaggatccgtaccgagctcggatccactagtaacggccgccagtgtgctggaattcaggtcctgcaggtctactctttacatgttctttactccgtctcaaaatttcctttttttgttggctctctccgaacgagttggagaaatcgttaaccctaatcgaagatctagattcctctacatacgtttgatctctctctcagtatggattacaaagcgccaaggagatactactcacacggagttgttgcgagacagcaagatttcgcaacagatatagttacgagaagaagaccttatgtcccttacgaccgtccaaataagttttcaaggagtctggtttggacgtcaaaagagtacaaatcacccgagggcaataatatgccaaggaccaatgatgtgtcaccgaaaccaccagttttaggtttggcgaggaagaatgctgcttgtgggccaatgagatcttctagtctcagaaaatgggtatgtaagtattggaaagatggaaagtgcaagaggggtgagcagtgccagttcttacactcttggtcttgtttccctggattggccatggtagcttctcttgaagggcacaataaggaactaaaggggatcgctctccctgagggttcagataaactcttttcagtcagtattgatggtacattgcgagtttgggactgcaattctggtcagtgtgtacattccatcaaccttgacgcagaagcagggtctctaatcagtgaaggcccttgggttttccttggcttgccaaacgctataaaggcttttaacgttcaaaccagtcaagatttgcatcttcaagcagcaggggtggttggtcaggtgaatgcaatgactattgcaaacggaatgctttttgctggaacaagttctggtagtatcttagtctggaaagctactacagactctgagtctgatccattcaaatacttgacatctcttgagggacatagtggtgaagtcacttgttttgctgttggaggtcaaatgctatactctggttctgtcgataaaacaatcaagatgtgggatctcaacaccctgcaatgtataatgaccctgaagcaacataccggcactgtcacttcactcttatgttgggataaatgtttgatatcgtcttccttggatgggaccataaaagtttgggcttattctgaaaacggaatcttgaaagttgttcaaactcgcagacaagaacagagtagtgttcatgctctttctggtatgcatgatgcagaagccaaaccgataatattctgctcttaccaaaacggaaccgttggcattttcgacctaccatcttttcaagaaagaggaaggatgttctctacgcacacgatcgccacactcacaattggtcctcaaggattgttattcagtggagacgagagtggtaacttgcgtgtatggaccttagctgctggcaacaaagtttagtcttttcgactaaagaattctgatttaattttgtggtttatatgttgagttaactgttaagagagttttattttgtaataggtgtatcagtcaataaacaatctttgtatcaaccaaatgtaatttttctcgttaattcgatttcagagtttttactttaagataaacaaactctttcacacatcatttaatgaaagtggagaagcttaaaaaacaaacaaagaaactgatccatttttggcgggtcttcttctactcttattcatatgtgttaacgaactatagcgtaaaattcagagcaagcgatctccgatttgaacgtggctatcaccggaggcccaccactacgggcgatacgctctaagtgaggattaaagtgctctggtggtgacgttgaagaaactcgcccatggtttttgttatctctgcagccaagtgtcgttctttcttcgccacttctcatcaagctacagtgaatttaaaaatggcgtctttctttgatctcgtatacataagctggattggtttcttaaacaaattcctctccttttgggtcttctgggtttgccttgtaagtgtttgtgtttttgcctctgagaaaaaatcgcggccgcaagtatgaactaaaatgcatgtaggtgtaagagctcatggagagcatggaatattgtatccgaccatgtaacagtataataactgagctccatctcacttcttctatgaataaacaaaggatgttatgatatattaacactctatctatgcaccttattgttctatgataaatttcctcttattattataaatcatctgaatcgtgacggcttatggaatgcttcaaatagtacaaaaacaaatgtgtactataagactttctaaacaattctaaccttagcattgtgaacgagacataagtgttaagaagacataacaattataatggaagaagtttgtctccatttatatattatatattacccacttatgtattatattaggatgttaaggagacataacaattataaagagagaagtttgtatccatttatatattatatactacccatttatatattatacttatccacttatttaatgtctttataaggtttgatccatgatatttctaatattttagttgatatgtatatgaaagggtactatttgaactctcttactctgtataaaggttggatcatccttaaagtgggtctatttaattttattgcttcttacagataaaaaaaaaattatgagttggtttgataaaatattgaaggatttaaaataataataaataacatataatatatgtatataaatttattataatataacatttatctataaaaaagtaaatattgtcataaatctatacaatcgtttagccttgctggacgaatctcaattatttaaacgagagtaaacatatttgactttttggttatttaacaaattattatttaacactatatgaaatttttttttttatcagcaaagaataaaattaaattaagaaggacaatggtgtcccaatccttatacaaccaacttccacaagaaagtcaagtcagagacaacaaaaaaacaagcaaaggaaattttttaatttgagttgtcttgtttgctgcataatttatgcagtaaaacactacacataacccttttagcagtagagcaatggttgaccgtgtgcttagcttcttttattttatttttttatcagcaaagaataaataaaataaaatgagacacttcagggatgtttcaacaagctctagagggcccaattcgccctatagtgagtcgtattacaattcactggccgtcgttttacaacgtcgtgactgggaaaaccctggcgttacccaacttaatcgccttgcagcacatccccctttcgccagctggcgtaatagcgaagaggcccgcaccgatcgcccttcccaacagttgcgcagcctatac

SEQ ID NO: 26 - DNA, 12929 bp, Artificial Sequence
  vector pKR1167
  misc_feature (8496)..(8496): n is a, c, g, or t
ggccgcaagtatgaactaaaatgcatgtaggtgtaagagctcatggagagcatggaatattgtatccgaccatgtaacagtataataactgagctccatctcacttcttctatgaataaacaaaggatgttatgatatattaacactctatctatgcaccttattgttctatgataaatttcctcttattattataaatcatctgaatcgtgacggcttatggaatgcttcaaatagtacaaaaacaaatgtgtactataagactttctaaacaattctaaccttagcattgtgaacgagacataagtgttaagaagacataacaattataatggaagaagtttgtctccatttatatattatatattacccacttatgtattatattaggatgttaaggagacataacaattataaagagagaagtttgtatccatttatatattatatactacccatttatatattatacttatccacttatttaatgtctttataaggtttgatccatgatatttctaatattttagttgatatgtatatgaaagggtactatttgaactctcttactctgtataaaggttggatcatccttaaagtgggtctatttaattttattgcttcttacagataaaaaaaaaattatgagttggtttgataaaatattgaaggatttaaaataataataaataacatataatatatgtatataaatttattataatataacatttatctataaaaaagtaaatattgtcataaatctatacaatcgtttagccttgctggacgaatctcaattatttaaacgagagtaaacatatttgactttttggttatttaacaaattattatttaacactatatgaaatttttttttttatcagcaaagaataaaattaaattaagaaggacaatggtgtcccaatccttatacaaccaacttccacaagaaagtcaagtcagagacaacaaaaaaacaagcaaaggaaattttttaatttgagttgtcttgtttgctgcataatttatgcagtaaaacactacacataacccttttagcagtagagcaatggttgaccgtgtgcttagcttcttttattttatttttttatcagcaaagaataaataaaataaaatgagacacttcagggatgtttcaacaagctctagagggcccaattcgccctatagtgagtcgtattacaattcactggccgtcgttttacaacgtcgtgactgggaaaaccctggcgttacccaacttaatcgccttgcagcacatccccctttcgccagctggcgtaatagcgaagaggcccgcaccgatcgcccttcccaacagttgcgcagcctatacgtacgagatccggccggccagatcctgcaggagatccaagcttggcgcgccgttctatagtgtcacctaaatcgtatgtgtatgatacataaggttatgtattaattgtagccgcgttctaacgacaatatgtccatatggtgcactctcagtacaatctgctctgatgccgcatagttaagccagccccgacacccgccaacacccgctgacgcgccctgacgggcttgtctgctcccggcatccgcttacagacaagctgtgaccgtctccgggagctgcatgtgtcagaggttttcaccgtcatcaccgaaacgcgcgagacgaaagggcctcgtgatacgcctatttttataggttaatgtcatgaccaaaatcccttaacgtgagttttcgttccactgagcgtcagaccccgtagaaaagatcaaaggatcttcttgagatcctttttttctgcgcgtaatctgctgcttgcaaacaaaaaaaccaccgctaccagcggtggtttgtttgccggatcaagagctaccaactctttttccgaaggtaactggcttcagcagagcgcagataccaaatactgtccttctagtgtagccgtagttaggccaccacttcaagaactctgtagcaccgcctacatacctcgctctgctaatcctgttaccagtggctgctgccagtggcgataagtcgtgtcttaccgggttggactcaagacgatagttaccggataaggcgcagcggtcgggctgaacggggggttcgtgcacacagcccagcttggagcgaacgacctacaccgaactgagatacctacagcgtgagcattgagaaagcgccacgcttcccgaagggagaaaggcggacaggtatccggtaagcggcagggtcggaacaggagagcgcacgagggagcttccagggggaaacgcctggtatctttatagtcctgtcgggtttcgccacctctgacttgagcgtcgatttttgtgatgctcgtcaggggggcggagcctatggaaaaacgccagcaacgcggcctttttacggttcctggccttttgctggccttttgctcacatgttctttcctgcgttatcccctgattctgtggataaccgtattaccgcctttgagtgagctgataccgctcgccgcagccgaacgaccgagcgcagcgagtcagtgagcgaggaagcggaagagcgcccaatacgcaaaccgcctctccccgcgcgttggccgattcattaatgcaggttgatcgattcgacatcgatctagtaacatagatgacaccgcgcgcgataatttatcctagtttgcgcgctatattttgttttctatcgcgtattaaatgtataattgcgggactctaatcataaaaacccatctcataaataacgtcatgcattacatgttaattattacatgcttaacgtaattcaacagaaattatatgataatcatcgcaagaccggcaacaggattcaatcttaagaaactttattgccaaatgtttgaacgatctgcttcgacgcactccttctttaggtacctcactattcctttgccctcggacgagtgctggggcgtcggtttccactatcggcgagtacttctacacagccatcggtccagacggccgcgcttctgcgggcgatttgtgtacgcccgacagtcccggctccggatcggacgattgcgtcgcatcgaccctgcgcccaagctgcatcatcgaaattgccgtcaaccaagctctgatagagttggtcaagaccaatgcggagcatatacgcccggagccgcggcgatcctgcaagctccggatgcctccgctcgaagtagcgcgtctgctgctccatacaagccaaccacggcctccagaagaagatgttggcgacctcgtattgggaatccccgaacatcgcctcgctccagtcaatgaccgctgttatgcggccattgtccgtcaggacattgttggagccgaaatccgcgtgcacgaggtgccggacttcggggcagtcctcggcccaaagcatcagctcatcgagagcctgcgcgacggacgcactgacggtgtcgtccatcacagtttgccagtgatacacatggggatcagcaatcgcgcatatgaaatcacgccatgtagtgtattgaccgattccttgcggtccgaatgggccgaacccgctcgtctggctaagatcggccgcagcgatcgcatccatggcctccgcgaccggctgcagaacagcgggcagttcggtttcaggcaggtcttgcaacgtgacaccctgtgcacggcgggagatgcaataggtcaggctctcgctgaattccccaatgtcaagcacttccggaatcgggagcgcggccgatgcaaagtgccgataaacataacgatctttgtagaaaccatcggcgcagctatttacccgcaggacatatccacgccctcctacatcgaagctgaaagcacgagattcttcgccctccgagagctgcatcaggtcggagacgctgtcgaacttttcgatcagaaacttctcgacagacgtcgcggtgagttcaggctttttcatggtttaataagaagagaaaagagttcttttgttatggctgaagtaatagagaaatgagctcgagcgtgtcctctccaaatgaaatgaacttccttatatagaggaagggtcttgcgaaggatagtgggattgtgcgtcatcccttacgtcagtggagatgtcacatcaatccacttgctttgaagacgtggttggaacgtcttctttttccacgatgctcctcgtgggtgggggtccatctttgggaccactgtcggcagaggcatcttgaatgatagcctttcctttatcgcaatgatggcatttgtaggagccaccttccttttctactgtcctttcgatgaagtgacagatagctgggcaatggaatccgaggaggtttcccgaaattatcctttgttgaaaagtctcaatagccctttggtcttctgagactgtatctttgacatttttggagtagaccagagtgtcgtgctccaccatgttgacgaagattttcttcttgtcattgagtcgtaaaagactctgtatgaactgttcgccagtcttcacggcgagttctgttagatcctcgatttgaatcttagactccatgcatggccttagattcagtaggaactacctttttagagactccaatctctattacttgccttggtttatgaagcaagccttgaatcgtccatactggaatagtacttctgatcttgagaaatatgtctttctctgtgttcttgatgcaattagtcctgaatcttttgactgcatctttaaccttcttgggaaggtatttgatctcctggagattgttactcgggtagatcgtcttgatgagacctgctgcgtaggcctctctaaccatctgtgggtcagcattctttctgaaattgaagaggctaaccttctcattatcagtggtgaacatagtgtcgtcaccttcaccttcgaacttccttcctagatcgtaaagatagaggaaatcgtccattgtaatctccggggcaaaggagatctcttttggggctggatcactgctgggccttttggttcctagcgtgagccagtgggctttttgctttggtgggcttgttagggccttagcaaagctcttgggcttgagttgagcttctcctttggggatgaagttcaacctgtctgtttgctgacttgttgtgtacgcgtcagctgctgctcttgcctctgtaatagtggcaaatttcttgtgtgcaactccgggaacgccgtttgttgccgcctttgtacaaccccagtcatcgtatataccggcatgtggaccgttatacacaacgtagtagttgatatgagggtgttgaatacccgattctgctctgagaggagcaactgtgctgttaagctcagatttttgtgggattggaattggatcgatctcgatcccgcgaaattaatacgactcactatagggagaccacaacggtttccctctagaaataattttgtttaactttaagaaggagatatacccatggaaaagcctgaactcaccgcgacgtctgtcgagaagtttctgatcgaaaagttcgacagcgtctccgacctgatgcagctctcggagggcgaagaatctcgtgctttcagcttcgatgtaggagggcgtggatatgtcctgcgggtaaatagctgcgccgatggtttctacaaagatcgttatgtttatcggcactttgcatcggccgcgctcccgattccggaagtgcttgacattggggaattcagcgagagcctgacctattgcatctcccgccgtgcacagggtgtcacgttgcaagacctgcctgaaaccgaactgcccgctgttctgcagccggtcgcggaggctatggatgcgatcgctgcggccgatcttagccagacgagcgggttcggcccattcggaccgcaaggaatcggtcaatacactacatggcgtgatttcatatgcgcgattgctgatccccatgtgtatcactggcaaactgtgatggacgacaccgtcagtgcgtccgtcgcgcaggctctcgatgagctgatgctttgggccgaggactgccccgaagtccggcacctcgtgcacgcggatttcggctccaacaatgtcctgacggacaatggccgcataacagcggtcattgactggagcgaggcgatgttcggggattcccaatacgaggtcgccaacatcttcttctggaggccgtggttggcttgtatggagcagcagacgcgctacttcgagcggaggcatccggagcttgcaggatcgccgcggctccgggcgtatatgctccgcattggtcttgaccaactctatcagagcttggttgacggcaatttcgatgatgcagcttgggcgcagggtcgatgcgacgcaatcgtccgatccggagccgggactgtcgggcgtacacaaatcgcccgcagaagcgcggccgtctggaccgatggctgtgtagaagtactcgccgatagtggaaaccgacgccccagcactcgtccgagggcaaaggaatagtgaggtacagcttggatcgatccggctgctaacaaagcccgaaaggaagctgagttggctgctgccaccgctgagcaataactagcataaccccttggggcctctaaacgggtcttgaggggttttttgctgaaaggaggaactatatccggatgatcgggcgcgccgtcgacggatccactagttctagagcggcccgcgccgtcgacggatataatgagccgtaaacaaagatgattaagtagtaattaatacgtactagtaaaagtggcaaaagataacgagaaagaaccaatttctttgcattcggccttagcggaaggcatatataagctttgattattttatttagtgtaatgatttcgtacaaccaaagcatttatttagtactctcacacttgtgtcgcggccggccgctacaggaacaggtggtggcggccctcggcgcgctcgtactgctccacgatggtgtagtcctcgttgtgggaggtgatgtccagcttggagtccacgtagtagtagccgggcagctgcacgggcttcttggccatgtagatggacttgaactccaccaggtagtggccgccgtccttcagcttcagggccttgtggatctcgcccttcagcacgccgtcgcgggggtacaggcgctcggtggaggcctcccagcccatagtcttcttctgcattacggggccgtcggaggggaagttcacgccgatgaacttcaccttgtagatgaaggagccgtcctgcagggaggagtcctgggtcacggtcaccacgccgccgtcctcgaagttcatcacgcgctcccacttgaagccctcggggaaggacagcttcttgtagtcggggatgtcggcggggtgcttcacgtacaccttggagccgtactggaactggggggacaggatgtcccaggcgaagggcagggggccgcccttggtcaccttcagcttggcggtctgggtgccctcgtaggggcggccctcgccctcgccctcgatctcgaactcgtggccgttcacggagccctccatgcgcaccttgaagcgcatgaactccttgatgacgtcctcggaggaggccatgggccgcttggggggctatggaagactttcttagttagttgtgtgaataagcaatgttgggagaatcgggactacttataggataggaataaaacagaaaagtattaagtgctaatgaaatatttagactgataattaaaatcttcacgtatgtccacttgatataaaaacgtcaggaataaaggaagtacagtagaatttaaaggtactctttttatatatacccgtgttctctttttggctagctagttgcataaaaaataatctatatttttatcattattttaaatatcttatgagatggtaaatatttatcataattttttttactattatttattatttgtgtgtgtaatacatatagaagttaattacaaattttatttactttttcattattttgatatgattcaccattaatttagtgttattatttataatagttcattttaatctttttgtatatattatgcgtgcagtacttttttcctacatataactactattacattttatttatataatatttttattaatgaattttcgtgataatatgtaatattgttcattattatttcagattttttaaaaatatttgtgttattatttatgaaatatgtaatttttttagtatttgattttatgatgataaagtgttctaaattcaaaagaagggggaaagcgtaaacattaaaaaacgtcatcaaacaaaaacaaaatcttgttaataaagataaaactgtttgttttgatcactgttatttcgtaatataaaaacattatttatatttatattgttgacaaccaaatttgcctatcaaatctaaccaatataatgcatgcgtggcaggtaatgtactaccatgaacttaagtcatgacataataaaccgtgaatctgaccaatgcatgtacctanctaaattgtatttgtgacacgaagcaaatgattcaattcacaatggagatgggaaacaaataatgaagaacccagaactaagaaagcttttctgaaaaataaaataaaggcaatgtcaaaagtatactgcatcatcagtccagaaagcacatgatatttttttatcagtatcaatgcagctagttttattttacaatatcgatatagctagtttaaatatattgcagctagatttataaatatttgtgttattatttatcatttgtgtaatcctgtttttagtattttagtttatatatgatgataatgtattccaaatttaaaagaagggaaataaatttaaacaagaaaaaaagtcatcaaacaaaaaacaaatgaaagggtggaaagatgttaccatgtaatgtgaatgttacagtatttcttttattatagagttaacaaattaactaatatgattttgttaataatgataaaatattttttttattattatttcataatataaaaatagtttacttaatataaaaaaaattctatcgttcacaacaaagttggccacctaatttaaccatgcatgtacccatggaccatattaggtaaccatcaaacctgatgaagagataaagagatgaagacttaagtcataacacaaaaccataaaaaacaaaaatacaatcaaccgtcaatctgaccaatgcatgaaaaagctgcaatagtgagtggcgacacaaagcacatgattttcttacaacggagataaaaccaaaaaaatatttcatgaacaacctagaacaaataaagcttttatataataaatatataaataaataaaggctatggaataatatacttcaatatatttggattaaataaattgttggcggggttgatatatttatacacacctaaagtcacttcaatctcattttcacttaacttttattttttttttctttttatttatcataaagagaatattgataatatactttttaacatatttttatgacattttttattggtgaaaacttattaaaaatcataaattttgtaagttagatttatttaaagagttcctcttcttattttaaattttttaataaatttttaaataactaaaatttgtgttaaaaatgttaaaaaagtgtgttattaacccttctcttcgaggatccgtaccgagctcggatccactagtaacggccgccagtgtgctggaattcaggtcctgcaggtctactctttacatgttctttactccgtctcaaaatttcctttttttgttggctctctccgaacgagttggagaaatcgttaaccctaatcgaagatctagattcctctacatacgtttgatctctctctcagtatggattacaaagcgccaaggagatactactcacacggagttgttgcgagacagcaagatttcgcaacagatatagttacgagaagaagaccttatgtcccttacgaccgtccaaataagttttcaaggagtctggtttggacgtcaaaagagtacaaatcacccgagggcaataatatgccaaggaccaatgatgtgtcaccgaaaccaccagttttaggtttggcgaggaagaatgctgcttgtgggccaatgagatcttctagtctcagaaaatgggtatgtaagtattggaaagatggaaagtgcaagaggggtgagcagtgccagttcttacactcttggtcttgtttccctggattggccatggtagcttctcttgaagggcacaataaggaactaaaggggatcgctctccctgagggttcagataaactcttttcagtcagtattgatggtacattgcgagtttgggactgcaattctggtcagtgtgtacattccatcaaccttgacgcagaagcagggtctctaatcagtgaaggcccttgggttttccttggcttgccaaacgctataaaggcttttaacgttcaaaccagtcaagatttgcatcttcaagcagcaggggtggttggtcaggtgaatgcaatgactattgcaaacggaatgctttttgctggaacaagttctggtagtatcttagtctggaaagctactacagactctgagtctgatccattcaaatacttgacatctcttgagggacatagtggtgaagtcacttgttttgctgttggaggtcaaatgctatactctggttctgtcgataaaacaatcaagatgtgggatctcaacaccctgcaatgtataatgaccctgaagcaacataccggcactgtcacttcactcttatgttgggataaatgtttgatatcgtcttccttggatgggaccataaaagtttgggcttattctgaaaacggaatcttgaaagttgttcaaactcgcagacaagaacagagtagtgttcatgctctttctggtatgcatgatgcagaagccaaaccgataatattctgctcttaccaaaacggaaccgttggcattttcgacctaccatcttttcaagaaagaggaaggatgttctctacgcacacgatcgccacactcacaattggtcctcaaggattgttattcagtggagacgagagtggtaacttgcgtgtatggaccttagctgctggcaacaaagtttagtcttttcgactaaagaattctgatttaattttgtggtttatatgttgagttaactgttaagagagttttattttgtaataggtgtatcagtcaataaacaatctttgtatcaaccaaatgtaatttttctcgttaattcgatttcagagtttttactttaagataaacaaactctttcacacatcatttaatgaaagtggagaagcttaaaaaacaaacaaagaaactgatccatttttggcgggtcttcttctactcttattcatatgtgttaacgaactatagcgtaaaattcagagcaagcgatctccgatttgaacgtggctatcaccggaggcccaccactacgggcgatacgctctaagtgaggattaaagtgctctggtggtgacgttgaagaaactcgcccatggtttttgttatctctgcagccaagtgtcgttctttcttcgccacttctcatcaagctacagtgaatttaaaaatggcgtctttctttgatctcgtatacataagctggattggtttcttaaacaaattcctctccttttgggtcttctgggtttgccttgtaagtgtttgtgtttttgcctctgagaaaaaatcgcggccgcatggagagatctcaacggcagtctcctccgccaccgtcgccgtcctcctcctcgtcctccgtctccgcggacaccgtcctcgtccctcccggaaagaggcggagggcggcgacggccaaggccggcgccgagcctaataagaggatccgcaaggaccccgccgccgccgccgcggggaagaggagctccgtctacaggggagtcaccaggcacaggtggacgggcaggttcgaggcgcatctctgggacaagcactgcctcgccgcgctccacaacaagaagaaaggcaggcaagtctacctgggggcgtatgacagcgaggaggcagctgctcgtgcctatgacctcgcagctctcaagtactggggtcctgagactctgctcaacttccctgtggaggattactccagcgagatgccggagatggaggccgtgtcccgggaggagtacctggcctccctccgccgcaggagcagcggcttctccaggggcgtctccaagtacagaggcgtcgccaggcatcaccacaacgggaggtgggaggcacggattgggcgagtctttgggaacaagtacctctacttgggaacatttgacactcaagaagaggcagccaaggcctatgaccttgcggccattgaataccgtggcgtcaatgctgtaaccaacttcgacatcagctgctacctggaccacccgctgttcctggcacagctccaacaggagccacaggtggtgccggcactcaaccaagaacctcaacctgatcagagcgaaaccggaactacagagcaagagccggagtcaagcgaagccaagacaccggatggcagtgcagaacccgatgagaacgcggtgcctgacgacaccgcggagcccctcaccacagtcgacgacagcatcgaagagggcttgtggagcccttgcatggattacgagctagacaccatgtcgagaccaaactttggcagctcaatcaatctgagcgagtggttcgctgacgcagacttcgactgcaacatcggatgcctgttcgatgggtgttctgcggctgacgaaggaagcaaggatggtgtaggtctggcagatttcagtctgtttgaggcaggtgatgtccagctgaaggatgttctttcggatatggaagaggggatacaacctccagcgatgatcagtgtgtgcaacgc

SEQ ID NO: 27 - DNA, 13268 bp, Artificial Sequence
  vector pKR92
cgcgcctcgagtgggcggatcccccgggctgcaggaattcactggccgtcgttttacaacgtcgtgactgggaaaaccctggcgttacccaacttaatcgccttgcagcacatccccctttcgccagctggcgtaatagcgaagaggcccgcaccgatcgcccttcccaacagttgcgcagcctgaatggcgaatggatcgatccatcgcgatgtaccttttgttagtcagcctctcgattgctcatcgtcattacacagtaccgaagtttgatcgatctagtaacatagatgacaccgcgcgcgataatttatcctagtttgcgcgctatattttgttttctatcgcgtattaaatgtataattgcgggactctaatcataaaaacccatctcataaataacgtcatgcattacatgttaattattacatgcttaacgtaattcaacagaaattatatgataatcatcgcaagaccggcaacaggattcaatcttaagaaactttattgccaaatgtttgaacgatctgcttcgacgcactccttctttactccaccatctcgtccttattgaaaacgtgggtagcaccaaaacgaatcaagtcgctggaactgaagttaccaatcacgctggatgatttgccagttggattaatcttgcctttccccgcatgaataatattgatgaatgcatgcgtgaggggtagttcgatgttggcaatagctgcaattgccgcgacatcctccaacgagcataattcttcagaaaaatagcgatgttccatgttgtcagggcatgcatgatgcacgttatgaggtgacggtgctaggcagtattccctcaaagtttcatagtcagtatcatattcatcattgcattcctgcaagagagaattgagacgcaatccacacgctgcggcaaccttccggcgttcgtggtctatttgctcttggacgttgcaaacgtaagtgttggatcgatccggggtgggcgaagaactccagcatgagatccccgcgctggaggatcatccagccggcgtcccggaaaacgattccgaagcccaacctttcatagaaggcggcggtggaatcgaaatctcgtgatggcaggttgggcgtcgcttggtcggtcatttcgaaccccagagtcccgctcagaagaactcgtcaagaaggcgatagaaggcgatgcgctgcgaatcgggagcggcgataccgtaaagcacgaggaagcggtcagcccattcgccgccaagctcttcagcaatatcacgggtagccaacgctatgtcctgatagcggtccgccacacccagccggccacagtcgatgaatccagaaaagcggccattttccaccatgatattcggcaagcaggcatcgccatgggtcacgacgagatcctcgccgtcgggcatgcgcgccttgagcctggcgaacagttcggctggcgcgagcccctgatgctcttcgtccagatcatcctgatcgacaagaccggcttccatccgagtacgtgctcgctcgatgcgatgtttcgcttggtggtcgaatgggcaggtagccggatcaagcgtatgcagccgccgcattgcatcagccatgatggatactttctcggcaggagcaaggtgagatgacaggagatcctgccccggcacttcgcccaatagcagccagtcccttcccgcttcagtgacaacgtcgagcacagctgcgcaaggaacgcccgtcgtggccagccacgatagccgcgctgcctcgtcctgcagttcattcagggcaccggacaggtcggtcttgacaaaaagaaccgggcgcccctgcgctgacagccggaacacggcggcatcagagcagccgattgtctgttgtgcccagtcatagccgaatagcctctccacccaagcggccggagaacctgcgtgcaatccatcttgttcaatcatgcgaaacgatccccgcaagcttggagactggtgatttcagcgtgtcctctccaaatgaaatgaacttccttatatagaggaagggtcttgcgaaggatagtgggattgtgcgtcatcccttacgtcagtggagatatcacatcaatccacttgctttgaagacgtggttggaacgtcttctttttccacgatgctcctcgtgggtgggggtccatctttgggaccactgtcggcagaggcatcttcaacgatggcctttcctttatcgcaatgatggcatttgtaggagccaccttccttttccactatcttcacaataaagtgacagatagctgggcaatggaatccgaggaggtttccggatattaccctttgttgaaaagtctcaattgccctttggtcttctgagactgtatctttgatatttttggagtagacaagcgtgtcgtgctccaccatgttgacgaagattttcttcttgtcattgagtcgtaagagactctgtatgaactgttcgccagtctttacggcgagttctgttaggtcctctatttgaatctttgactccatggcctttgattcagtgggaactacctttttagagactccaatctctattacttgccttggtttgtgaagcaagccttgaatcgtccatactggaatagtacttctgatcttgagaaatatatctttctctgtgttcttgatgcagttagtcctgaatcttttgactgcatctttaaccttcttgggaaggtatttgatctcctggagattattgctcgggtagatcgtcttgatgagacctgctgcgtaagcctctctaaccatctgtgggttagcattctttctgaaattgaaaaggctaatcttctcattatcagtggtgaacatggtatcgtcaccttctccgtcgaacttcctgactagatcgtagagatagaggaagtcgtccattgtgatctctggggcaaaggagtctgaattaattcgatatggtggatttatcacaaatgggacccgccgccgacagaggtgtgatgttaggccaggactttgaaaatttgcgcaactatcgtatagtggccgacaaattgacgccgagttgacagactgcctagcatttgagtgaattatgtgaggtaatgggctacactgaattggtagctcaaactgtcagtatttatgtatatgagtgtatattttcgcataatctcagaccaatctgaagatgaaatgggtatctgggaatggcgaaatcaaggcatcgatcgtgaagtttctcatctaagcccccatttggacgtgaatgtagacacgtcgaaataaagatttccgaattagaataatttgtttattgctttcgcctataaatacgacggatcgtaatttgtcgttttatcaaaatgtactttcattttataataacgctgcggacatctacatttttgaattgaaaaaaaattggtaattactctttctttttctccatattgaccatcatactcattgctgatccatgtagatttcccggacatgaagccatttacaattgaatatatcctgccgccgctgccgctttgcacccggtggagcttgcatgttggtttctacgcagaactgagccggttaggcagataatttccattgagaactgagccatgtgcaccttccccccaacacggtgagcgacggggcaacggagtgatccacatgggacttttaaacatcatccgtcggatggcgttgcgagagaagcagtcgatccgtgagatcagccgacgcaccgggcaggcgcgcaacacgatcgcaaagtatttgaacgcaggtacaatcgagccgacgttcacgcggaacgaccaagcaagctagctttaatgcggtagtttatcacagttaaattgctaacgcagtcaggcaccgtgtatgaaatctaacaatgcgctcatcgtcatcctcggcaccgtcaccctggatgctgtaggcataggcttggttatgccggtactgccgggcctcttgcgggatatcgtccattccgacagcatcgccagtcactatggcgtgctgctagcgctatatgcgttgatgcaatttctatgcgcacccgttctcggagcactgtccgaccgctttggccgccgcccagtcctgctcgcttcgctacttggagccactatcgactacgcgatcatggcgaccacacccgtcctgtggtccaacccctccgctgctatagtgcagtcggcttctgacgttcagtgcagccgtcttctgaaaacgacatgtcgcacaagtcctaagttacgcgacaggctgccgccctgcccttttcctggcgttttcttgtcgcgtgttttagtcgcataaagtagaatacttgcgactagaaccggagacattacgccatgaacaagagcgccgccgctggcctgctgggctatgcccgcgtcagcaccgacgaccaggacttgaccaaccaacgggccgaactgcacgcggccggctgcaccaagctgttttccgagaagatcaccggcaccaggcgcgaccgcccggagctggccaggatgcttgaccacctacgccctggcgacgttgtgacagtgaccaggctagaccgcctggcccgcagcacccgcgacctactggacattgccgagcgcatccaggaggccggcgcgggcctgcgtagcctggcagagccgtgggccgacaccaccacgccggccggccgcatggtgttgaccgtgttcgccggcattgccgagttcgagcgttccctaatcatcgaccgcacccggagcgggcgcgaggccgccaaggcccgaggcgtgaagtttggcccccgccctaccctcaccccggcacagatcgcgcacgcccgcgagctgatcgaccaggaaggccgcaccgtgaaagaggcggctgcactgcttggcgtgcatcgctcgaccctgtaccgcgcacttgagcgcagcgaggaagtgacgcccaccgaggccaggcggcgcggtgccttccgtgaggacgcattgaccgaggccgacgccctggcggccgccgagaatgaacgccaagaggaacaagcatgaaaccgcaccaggacggccaggacgaaccgtttttcattaccgaagagatcgaggcggagatgatcgcggccgggtacgtgttcgagccgcccgcgcacgtctcaaccgtgcggctgcatgaaatcctggccggtttgtctgatgccaagctggcggcctggccggccagcttggccgctgaagaaaccgagcgccgccgtctaaaaaggtgatgtgtatttgagtaaaacagcttgcgtcatgcggtcgctgcgtatatgatgcgatgagtaaataaacaaatacgcaagggaacgcatgaagttatcgctgtacttaaccagaaaggcgggtcaggcaagacgaccatcgcaacccatctagcccgcgccctgcaactcgccggggccgatgttctgttagtcgattccgatccccagggcagtgcccgcgattgggcggccgtgcgggaagatcaaccgctaaccgttgtcggcatcgaccgcccgacgattgaccgcgacgtgaaggccatcggccggcgcgacttcgtagtgatcgacggagcgccccaggcggcggacttggctgtgtccgcgatcaaggcagccgacttcgtgctgattccggtgcagccaagcccttacgacatatgggccaccgccgacctggtggagctggttaagcagcgcattgaggtcacggatggaaggctacaagcggcctttgtcgtgtcgcgggcgatcaaaggcacgcgcatcggcggtgaggttgccgaggcgctggccgggtacgagctgcccattcttgagtcccgtatcacgcagcgcgtgagctacccaggcactgccgccgccggcacaaccgttcttgaatcagaacccgagggcgacgctgcccgcgaggtccaggcgctggccgctgaaattaaatcaaaactcatttgagttaatgaggtaaagagaaaatgagcaaaagcacaaacacgctaagtgccggccgtccgagcgcacgcagcagcaaggctgcaacgttggccagcctggcagacacgccagccatgaagcgggtcaactttcagttgccggcggaggatcacaccaagctgaagatgtacgcggtacgccaaggcaagaccattaccgagctgctatctgaatacatcgcgcagctaccagagtaaatgagcaaatgaataaatgagtagatgaattttagcggctaaaggaggcggcatggaaaatcaagaacaaccaggcaccgacgccgtggaatgccccatgtgtggaggaacgggcggttggccaggcgtaagcggctgggttgtctgccggccctgcaatggcactggaacccccaagcccgaggaatcggcgtgagcggtcgcaaaccatccggcccggtacaaatcggcgcggcgctgggtgatgacctggtggagaagttgaaggccgcgcaggccgcccagcggcaacgcatcgaggcagaagcacgccccggtgaatcgtggcaagcggccgctgatcgaatccgcaaagaatcccggcaaccgccggcagccggtgcgccgtcgattaggaagccgcccaagggcgacgagcaaccagattttttcgttccgatgctctatgacgtgggcacccgcgatagtcgcagcatcatggacgtggccgttttccgtctgtcgaagcgtgaccgacgagctggcgaggtgatccgctacgagcttccagacgggcacgtagaggtttccgcagggccggccggcatggccagtgtgtgggattacgacctggtactgatggcggtttcccatctaaccgaatccatgaaccgataccgggaagggaagggagacaagcccggccgcgtgttccgtccacacgttgcggacgtactcaagttctgccggcgagccgatggcggaaagcagaaagacgacctggtagaaacctgcattcggttaaacaccacgcacgttgccatgcagcgtacgaagaaggccaagaacggccgcctggtgacggtatccgagggtgaagccttgattagccgctacaagatcgtaaagagcgaaaccgggcggccggagtacatcgagatcgagctagctgattggatgtaccgcgagatcacagaaggcaagaacccggacgtgctgacggttcaccccgattactttttgatcgatcccggcatcggccgttttctctaccgcctggcacgccgcgccgcaggcaaggcagaagccagatggttgttcaagacgatctacgaacgcagtggcagcgccggagagttcaagaagttctgtttcaccgtgcgcaagctgatcgggtcaaatgacctgccggagtacgatttgaaggaggaggcggggcaggctggcccgatcctagtcatgcgctaccgcaacctgatcgagggcgaagcatccgccggttcctaatgtacggagcagatgctagggcaaattgccctagcaggggaaaaaggtcgaaaaggtctctttcctgtggatagcacgtacattgggaacccaaagccgtacattgggaaccggaacccgtacattgggaacccaaagccgtacattgggaaccggtcacacatgtaagtgactgatataaaagagaaaaaaggcgatttttccgcctaaaactctttaaaacttattaaaactcttaaaacccgcctggcctgtgcataactgtctggccagcgcacagccgaagagctgcaaaaagcgcctacccttcggtcgctgcgctccctacgccccgccgcttcgcgtcggcctatcgcggccgctggccgctcaaaaatggctggcctacggccaggcaatctaccagggcgcggacaagccgcgccgtcgccactcgaccgccggcgcccacatcaaggcaccctgcctcgcgcgtttcggtgatgacggtgaaaacctctgacacatgcagctcccggagacggtcacagcttgtctgtaagcggatgccgggagcagacaagcccgtcagggcgcgtcagcgggtgttggcgggtgtcggggcgcagccatgacccagtcacgtagcgatagcggagtgtatactggcttaactatgcggcatcagagcagattgtactgagagtgcaccatatgcggtgtgaaataccgcacagatgcgtaaggagaaaataccgcatcaggcgctcttccgcttcctcgctcactgactcgctgcgctcggtcgttcggctgcggcgagcggtatcagctcactcaaaggcggtaatacggttatccacagaatcaggggataacgcaggaaagaacatgtgagcaaaaggccagcaaaaggccaggaaccgtaaaaaggccgcgttgctggcgtttttccataggctccgcccccctgacgagcatcacaaaaatcgacgctcaagtcagaggtggcgaaacccgacaggactataaagataccaggcgtttccccctggaagctccctcgtgcgctctcctgttccgaccctgccgcttaccggatacctgtccgcctttctcccttcgggaagcgtggcgctttctcatagctcacgctgtaggtatctcagttcggtgtaggtcgttcgctccaagctgggctgtgtgcacgaaccccccgttcagcccgaccgctgcgccttatccggtaactatcgtcttgagtccaacccggtaagacacgacttatcgccactggcagcagccactggtaacaggattagcagagcgaggtatgtaggcggtgctacagagttcttgaagtggtggcctaactacggctacactagaaggacagtatttggtatctgcgctctgctgaagccagttaccttcggaaaaagagttggtagctcttgatccggcaaacaaaccaccgctggtagcggtggtttttttgtttgcaagcagcagattacgcgcagaaaaaaaggatctcaagaagatcctttgatcttttctacggggtctgacgctcagtggaacgaaaactcacgttaagggattttggtcatgagattatcaaaaaggatcttcacctagatccttttaaattaaaaatgaagttttaaatcaatctaaagtatatatgagtaaacttggtctgacagttaccaatgcttaatcagtgaggcacctatctcagcgatctgtctatttcgttcatccatagttgcctgactccccgtcgtgtagataactacgatacgggagggcttaccatctggccccagtgctgcaatgataccgcgagacccacgctcaccggctccagatttatcagcaataaaccagccagccggaagggccgagcgcagaagtggtcctgcaactttatccgcctccatccagtctattaattgttgccgggaagctagagtaagtagttcgccagttaatagtttgcgcaacgttgttgccattgctacaggcatcgtggtgtcacgctcgtcgtttggtatggcttcattcagctccggttcccaacgatcaaggcgagttacatgatcccccatgttgtgcaaaaaagcggttagctccttcggtcctccgatcgttgtcagaagtaagttggccgcagtgttatcactcatggttatggcagcactgcataattctcttactgtcatgccatccgtaagatgcttttctgtgactggtgagtactcaaccaagtcattctgagaatagtgtatgcggcgaccgagttgctcttgcccggcgtcaacacgggataataccgcgccacatagcagaactttaaaagtgctcatcattggaaaagacctgcaggggggggggggcgctgaggtctgcctcgtgaagaaggtgttgctgactcataccaggcctgaatcgccccatcatccagccagaaagtgagggagccacggttgatgagagctttgttgtaggtggaccagttggtgattttgaacttttgctttgccacggaacggtctgcgttgtcgggaagatgcgtgatctgatccttcaactcagcaaaagttcgatttattcaacaaagccgccgtcccgtcaagtcagcgtaatgctctgccagtgttacaaccaattaaccaattctgattagaaaaactcatcgagcatcaaatgaaactgcaatttattcatatcaggattatcaataccatatttttgaaaaagccgtttctgtaatgaaggagaaaactcaccgaggcagttccataggatggcaagatcctggtatcggtctgcgattccgactcgtccaacatcaatacaacctattaatttcccctcgtcaaaaataaggttatcaagtgagaaatcaccatgagtgacgactgaatccggtgagaatggcaaaagcttatgcatttctttccagacttgttcaacaggccagccattacgctcgtcatcaaaatcactcgcatcaaccaaaccgttattcattcgtgattgcgcctgagcgagacgaaatacgcgatcgctgttaaaaggacaattacaaacaggaatcgaatgcaaccggcgcaggaacactgccagcgcatcaacaatattttcacctgaatcaggatattcttctaatacctggaatgctgttttcccggggatcgcagtggtgagtaaccatgcatcatcaggagtacggataaaatgcttgatggtcggaagaggcataaattccgtcagccagtttagtctgaccatctcatctgtaacatcattggcaacgctacctttgccatgtttcagaaacaactctggcgcatcgggcttcccatacaatcgatagattgtcgcacctgattgcccgacattatcgcgagcccatttatacccatataaatcagcatccatgttggaatttaatcgcggcctcgagcaagacgtttcccgttgaatatggctcataacaccccttgtattactgtttatgtaagcagacagttttattgttcatgatgatatatttttatcttgtgcaatgtaacatcagagattttgagacacaacgtggctttcccccccccccctgcaggtcaattcggtcgatatggctattacgaagaaggctcgtgcgcggagtcccgtgaactttcccacgcaacaagtgaaccgcaccgggtttgccggaggccatttcgttaaaatgcgcagccatggctgcttcgtccagcatggcgtaatactgatcctcgtcttcggctggcggtatattgccgatgggcttcaaaagccgccgtggttgaaccagtctatccattccaaggtagcgaactcgaccgcttcgaagctcctccatggtccacgccgatgaatgacctcggccttgtaaagaccgttgatcgcttctgcgagggcgttgtcgtgctgtcgccgacgcttccgatagatggctcgatacctgcttctgccaaccgctcggaatagcgaaaggacacgtattgaacaccgcgatccgagtgatgcactaggccgccatgagcgggacgccgatcatgatgagcctcctcgagggcatcgaggacaaagcctgcatgtgctgtccggctcgcccgccatccgacaatgcgacgggcgaagacgtcgatcacgaaggccacgtagacgaagccctcccaagtggcgacataagtacggacatgcgcaaaggctttcccggtttgtcgctgatggtgcaagagacgctgaagcgcgatccgatgcgcaggcatctgttcgtcttccgcggtcgtggcggtggcctgatcaaggtcactcgccgaagagctgcatgattggctcgaaaccgagcgggggaaattgtcgcgcagttctcccgtcgccgaggcgataaattacatgctcaagcgatgggatggcattacgtcattcctcgatgacggcccgatttgcctgacgaacaatgctgccgaacgaacgctcagaggctatgtactcggcaggaagtcatggctgtttgccggatcggatcgttgtgctgaacgtgcggcgttcatggcgacactgatcatgagcgccaagctcaataacatcgatccgcaggcctggcttgccgacgtccgcgccgaccttgcggacgctccgatcagcaggcttgagcaacagctgccgtggaactggacatccaagacactgagtgctcaggcggcctgacctgcggccttcaccggatacttaccccattatcgcagattgcgatgaagcatcagcgtcattcagcaatcttgccaaagtatgcaggctcgcgagaatcgacgtgcgaaaccggctggttgcgccaaagatccgcttgcggagcggtcgaacattcatgctgggacttcaagaggtcgagtagaggaagaaccggaaaggttgcaccggaaaatatgcgttcctttggagagcgcctcatggacgtgaacaaatcgcccggaccaaggatgccacggatacaaaagctcgcgaagctcggtcccgtgggtgttctgtcgtctcgttgtacaacgaaatccattcccattccgcgctcaagatggcttcccctcggcagttcatcagggctaaatcaatctagccgacttgtccggtgaaatgggctgcactccaacagaaacaatcaaacaaacatacacagcgacttattcacacgagctcaaattacaacggtatatatcctgccagtcagcatcatcacaccaaaagttaggcccgaatagtttgaaattagaaagctcgcaattgaggtctacaggccaaattcgctcttagccgtacaatattactcaccggtgcgatgccccccatcgtaggtgaaggtggaaattaatgatccatcttgagaccacaggcccacaacagctaccagtttcctcaagggtccaccaaaaacgtaagcgcttacgtacatggtcgataagaaaaggcaatttgtagatgttaacatccaacgtcgctttcagggatcgatccaatacgcaaaccgcctctccccgcgcgttggccgattcattaatgcagctggcacgacaggtttcccgactggaaagcgggcagtgagcgcaacgcaattaatgtgagttagctcactcattaggcaccccaggctttacactttatgcttccggctcgtatgttgtgtggaattgtgagcggataacaatttcacacaggaaacagctatgaccatgattacgccaagcttgcatgcctgcaggtcgactctagaggatctgg

SEQ ID NO: 28 - DNA, 20921 bp, Artificial Sequence
  vector pKR1223
  misc_feature (15083)..(15083): n is a, c, g, or t
cgcgccagatcctctagagtcgacctgcaggcatgcaagcttggcgtaatcatggtcatagctgtttcctgtgtgaaattgttatccgctcacaattccacacaacatacgagccggaagcataaagtgtaaagcctggggtgcctaatgagtgagctaactcacattaattgcgttgcgctcactgcccgctttccagtcgggaaacctgtcgtgccagctgcattaatgaatcggccaacgcgcggggagaggcggtttgcgtattggatcgatccctgaaagcgacgttggatgttaacatctacaaattgccttttcttatcgaccatgtacgtaagcgcttacgtttttggtggacccttgaggaaactggtagctgttgtgggcctgtggtctcaagatggatcattaatttccaccttcacctacgatggggggcatcgcaccggtgagtaatattgtacggctaagagcgaatttggcctgtagacctcaattgcgagctttctaatttcaaactattcgggcctaacttttggtgtgatgatgctgactggcaggatatataccgttgtaatttgagctcgtgtgaataagtcgctgtgtatgtttgtttgattgtttctgttggagtgcagcccatttcaccggacaagtcggctagattgatttagccctgatgaactgccgaggggaagccatcttgagcgcggaatgggaatggatttcgttgtacaacgagacgacagaacacccacgggaccgagcttcgcgagcttttgtatccgtggcatccttggtccgggcgatttgttcacgtccatgaggcgctctccaaaggaacgcatattttccggtgcaacctttccggttcttcctctactcgacctcttgaagtcccagcatgaatgttcgaccgctccgcaagcggatctttggcgcaaccagccggtttcgcacgtcgattctcgcgagcctgcatactttggcaagattgctgaatgacgctgatgcttcatcgcaatctgcgataatggggtaagtatccggtgaaggccgcaggtcaggccgcctgagcactcagtgtcttggatgtccagttccacggcagctgttgctcaagcctgctgatcggagcgtccgcaaggtcggcgcggacgtcggcaagccaggcctgcggatcgatgttattgagcttggcgctcatgatcagtgtcgccatgaacgccgcacgttcagcacaacgatccgatccggcaaacagccatgacttcctgccgagtacatagcctctgagcgttcgttcggcagcattgttcgtcaggcaaatcgggccgtcatcgaggaatgacgtaatgccatcccatcgcttgagcatgtaatttatcgcctcggcgacgggagaactgcgcgacaatttcccccgctcggtttcgagccaatcatgcagctcttcggcgagtgaccttgatcaggccaccgccacgaccgcggaagacgaacagatgcctgcgcatcggatcgcgcttcagcgtctcttgcaccatcagcgacaaaccgggaaagcctttgcgcatgtccgtacttatgtcgccacttgggagggcttcgtctacgtggccttcgtgatcgacgtcttcgcccgtcgcattgtcggatggcgggcgagccggacagcacatgcaggctttgtcctcgatgccctcgaggaggctcatcatgatcggcgtcccgctcatggcggcctagtgcatcactcggatcgcggtgttcaatacgtgtcctttcgctattccgagcggttggcagaagcaggtatcgagccatctatcggaagcgtcggcgacagcacgacaacgccctcgcagaagcgatcaacggtctttacaaggccgaggtcattcatcggcgtggaccatggaggagcttcgaagcggtcgagttcgctaccttggaatggatagactggttcaaccacggcggcttttgaagcccatcggcaatataccgccagccgaagacgaggatcagtattacgccatgctggacgaagcagccatggctgcgcattttaacgaaatggcctccggcaaacccggtgcggttcacttgttgcgtgggaaagttcacgggactccgcgcacgagccttcttcgtaatagccatatcgaccgaattgacctgcaggggggggggggaaagccacgttgtgtctcaaaatctctgatgttacattgcacaagataaaaatatatcatcatgaacaataaaactgtctgcttacataaacagtaatacaaggggtgttatgagccatattcaacgggaaacgtcttgctcgaggccgcgattaaattccaacatggatgctgatttatatgggtataaatgggctcgcgataatgtcgggcaatcaggtgcgacaatctatcgattgtatgggaagcccgatgcgccagagttgtttctgaaacatggcaaaggtagcgttgccaatgatgttacagatgagatggtcagactaaactggctgacggaatttatgcctcttccgaccatcaagcattttatccgtactcctgatgatgcatggttactcaccactgcgatccccgggaaaacagcattccaggtattagaagaatatcctgattcaggtgaaaatattgttgatgcgctggcagtgttcctgcgccggttgcattcgattcctgtttgtaattgtccttttaacagcgatcgcgtatttcgtctcgctcaggcgcaatcacgaatgaataacggtttggttgatgcgagtgattttgatgacgagcgtaatggctggcctgttgaacaagtctggaaagaaatgcataagcttttgccattctcaccggattcagtcgtcactcatggtgatttctcacttgataaccttatttttgacgaggggaaattaataggttgtattgatgttggacgagtcggaatcgcagaccgataccaggatcttgccatcctatggaactgcctcggtgagttttctccttcattacagaaacggctttttcaaaaatatggtattgataatcctgatatgaataaattgcagtttcatttgatgctcgatgagtttttctaatcagaattggttaattggttgtaacactggcagagcattacgctgacttgacgggacggcggctttgttgaataaatcgaacttttgctgagttgaaggatcagatcacgcatcttcccgacaacgcagaccgttccgtggcaaagcaaaagttcaaaatcaccaactggtccacctacaacaaagctctcatcaaccgtggctccctcactttctggctggatgatggggcgattcaggcctggtatgagtcagcaacaccttcttcacgaggcagacctcagcgcccccccccccctgcaggtcttttccaatgatgagcacttttaaagttctgctatgtggcgcggtattatcccgtgttgacgccgggcaagagcaactcggtcgccgcatacactattctcagaatgacttggttgagtactcaccagtcacagaaaagcatcttacggatggcatgacagtaagagaattatgcagtgctgccataaccatgagtgataacactgcggccaacttacttctgacaacgatcggaggaccgaaggagctaaccgcttttttgcacaacatgggggatcatgtaactcgccttgatcgttgggaaccggagctgaatgaagccataccaaacgacgagcgtgacaccacgatgcctgtagcaatggcaacaacgttgcgcaaactattaactggcgaactacttactctagcttcccggcaacaattaatagactggatggaggcggataaagttgcaggaccacttctgcgctcggcccttccggctggctggtttattgctgataaatctggagccggtgagcgtgggtctcgcggtatcattgcagcactggggccagatggtaagccctcccgtatcgtagttatctacacgacggggagtcaggcaactatggatgaacgaaatagacagatcgctgagataggtgcctcactgattaagcattggtaactgtcagaccaagtttactcatatatactttagattgatttaaaacttcatttttaatttaaaaggatctaggtgaagatcctttttgataatctcatgaccaaaatcccttaacgtgagttttcgttccactgagcgtcagaccccgtagaaaagatcaaaggatcttcttgagatcctttttttctgcgcgtaatctgctgcttgcaaacaaaaaaaccaccgctaccagcggtggtttgtttgccggatcaagagctaccaactctttttccgaaggtaactggcttcagcagagcgcagataccaaatactgtccttctagtgtagccgtagttaggccaccacttcaagaactctgtagcaccgcctacatacctcgctctgctaatcctgttaccagtggctgctgccagtggcgataagtcgtgtcttaccgggttggactcaagacgatagttaccggataaggcgcagcggtcgggctgaacggggggttcgtgcacacagcccagcttggagcgaacgacctacaccgaactgagatacctacagcgtgagctatgagaaagcgccacgcttcccgaagggagaaaggcggacaggtatccggtaagcggcagggtcggaacaggagagcgcacgagggagcttccagggggaaacgcctggtatctttatagtcctgtcgggtttcgccacctctgacttgagcgtcgatttttgtgatgctcgtcaggggggcggagcctatggaaaaacgccagcaacgcggcctttttacggttcctggccttttgctggccttttgctcacatgttctttcctgcgttatcccctgattctgtggataaccgtattaccgcctttgagtgagctgataccgctcgccgcagccgaacgaccgagcgcagcgagtcagtgagcgaggaagcggaagagcgcctgatgcggtattttctccttacgcatctgtgcggtatttcacaccgcatatggtgcactctcagtacaatctgctctgatgccgcatagttaagccagtatacactccgctatcgctacgtgactgggtcatggctgcgccccgacacccgccaacacccgctgacgcgccctgacgggcttgtctgctcccggcatccgcttacagacaagctgtgaccgtctccgggagctgcatgtgtcagaggttttcaccgtcatcaccgaaacgcgcgaggcagggtgccttgatgtgggcgccggcggtcgagtggcgacggcgcggcttgtccgcgccctggtagattgcctggccgtaggccagccatttttgagcggccagcggccgcgataggccgacgcgaagcggcggggcgtagggagcgcagcgaccgaagggtaggcgctttttgcagctcttcggctgtgcgctggccagacagttatgcacaggccaggcgggttttaagagttttaataagttttaaagagttttaggcggaaaaatcgccttttttctcttttatatcagtcacttacatgtgtgaccggttcccaatgtacggctttgggttcccaatgtacgggttccggttcccaatgtacggctttgggttcccaatgtacgtgctatccacaggaaagagaccttttcgacctttttcccctgctagggcaatttgccctagcatctgctccgtacattaggaaccggcggatgcttcgccctcgatcaggttgcggtagcgcatgactaggatcgggccagcctgccccgcctcctccttcaaatcgtactccggcaggtcatttgacccgatcagcttgcgcacggtgaaacagaacttcttgaactctccggcgctgccactgcgttcgtagatcgtcttgaacaaccatctggcttctgccttgcctgcggcgcggcgtgccaggcggtagagaaaacggccgatgccgggatcgatcaaaaagtaatcggggtgaaccgtcagcacgtccgggttcttgccttctgtgatctcgcggtacatccaatcagctagctcgatctcgatgtactccggccgcccggtttcgctctttacgatcttgtagcggctaatcaaggcttcaccctcggataccgtcaccaggcggccgttcttggccttcttcgtacgctgcatggcaacgtgcgtggtgtttaaccgaatgcaggtttctaccaggtcgtctttctgctttccgccatcggctcgccggcagaacttgagtacgtccgcaacgtgtggacggaacacgcggccgggcttgtctcccttcccttcccggtatcggttcatggattcggttagatgggaaaccgccatcagtaccaggtcgtaatcccacacactggccatgccggccggccctgcggaaacctctacgtgcccgtctggaagctcgtagcggatcacctcgccagctcgtcggtcacgcttcgacagacggaaaacggccacgtccatgatgctgcgactatcgcgggtgcccacgtcatagagcatcggaacgaaaaaatctggttgctcgtcgcccttgggcggcttcctaatcgacggcgcaccggctgccggcggttgccgggattctttgcggattcgatcagcggccgcttgccacgattcaccggggcgtgcttctgcctcgatgcgttgccgctgggcggcctgcgcggccttcaacttctccaccaggtcatcacccagcgccgcgccgatttgtaccgggccggatggtttgcgaccgctcacgccgattcctcgggcttgggggttccagtgccattgcagggccggcagacaacccagccgcttacgcctggccaaccgcccgttcctccacacatggggcattccacggcgtcggtgcctggttgttcttgattttccatgccgcctcctttagccgctaaaattcatctactcatttattcatttgctcatttactctggtagctgcgcgatgtattcagatagcagctcggtaatggtcttgccttggcgtaccgcgtacatcttcagcttggtgtgatcctccgccggcaactgaaagttgacccgcttcatggctggcgtgtctgccaggctggccaacgttgcagccttgctgctgcgtgcgctcggacggccggcacttagcgtgtttgtgcttttgctcattttctctttacctcattaactcaaatgagttttgatttaatttcagcggccagcgcctggacctcgcgggcagcgtcgccctcgggttctgattcaagaacggttgtgccggcggcggcagtgcctgggtagctcacgcgctgcgtgatacgggactcaagaatgggcagctcgtacccggccagcgcctcggcaacctcaccgccgatgcgcgtgcctttgatcgcccgcgacacgacaaaggccgcttgtagccttccatccgtgacctcaatgcgctgcttaaccagctccaccaggtcggcggtggcccatatgtcgtaagggcttggctgcaccggaatcagcacgaagtcggctgccttgatcgcggacacagccaagtccgccgcctggggcgctccgtcgatcactacgaagtcgcgccggccgatggccttcacgtcgcggtcaatcgtcgggcggtcgatgccgacaacggttagcggttgatcttcccgcacggccgcccaatcgcgggcactgccctggggatcggaatcgactaacagaacatcggccccggcgagttgcagggcgcgggctagatgggttgcgatggtcgtcttgcctgacccgcctttctggttaagtacagcgataacttcatgcgttcccttgcgtatttgtttatttactcatcgcatcatatacgcagcgaccgcatgacgcaagctgttttactcaaatacacatcacctttttagacggcggcgctcggtttcttcagcggccaagctggccggccaggccgccagcttggcatcagacaaaccggccaggatttcatgcagccgcacggttgagacgtgcgcgggcggctcgaacacgtacccggccgcgatcatctccgcctcgatctcttcggtaatgaaaaacggttcgtcctggccgtcctggtgcggtttcatgcttgttcctcttggcgttcattctcggcggccgccagggcgtcggcctcggtcaatgcgtcctcacggaaggcaccgcgccgcctggcctcggtgggcgtcacttcctcgctgcgctcaagtgcgcggtacagggtcgagcgatgcacgccaagcagtgcagccgcctctttcacggtgcggccttcctggtcgatcagctcgcgggcgtgcgcgatctgtgccggggtgagggtagggcgggggccaaacttcacgcctcgggccttggcggcctcgcgcccgctccgggtgcggtcgatgattagggaacgctcgaactcggcaatgccggcgaacacggtcaacaccatgcggccggccggcgtggtggtgtcggcccacggctctgccaggctacgcaggcccgcgccggcctcctggatgcgctcggcaatgtccagtaggtcgcgggtgctgcgggccaggcggtctagcctggtcactgtcacaacgtcgccagggcgtaggtggtcaagcatcctggccagctccgggcggtcgcgcctggtgccggtgatcttctcggaaaacagcttggtgcagccggccgcgtgcagttcggcccgttggttggtcaagtcctggtcgtcggtgctgacgcgggcatagcccagcaggccagcggcggcgctcttgttcatggcgtaatgtctccggttctagtcgcaagtattctactttatgcgactaaaacacgcgacaagaaaacgccaggaaaagggcagggcggcagcctgtcgcgtaacttaggacttgtgcgacatgtcgttttcagaagacggctgcactgaacgtcagaagccgactgcactatagcagcggaggggttggaccacaggacgggtgtggtcgccatgatcgcgtagtcgatagtggctccaagtagcgaagcgagcaggactgggcggcggccaaagcggtcggacagtgctccgagaacgggtgcgcatagaaattgcatcaacgcatatagcgctagcagcacgccatagtgactggcgatgctgtcggaatggacgatatcccgcaagaggcccggcagtaccggcataaccaagcctatgcctacagcatccagggtgacggtgccgaggatgacgatgagcgcattgttagatttcatacacggtgcctgactgcgttagcaatttaactgtgataaactaccgcattaaagctagcttgcttggtcgttccgcgtgaacgtcggctcgattgtacctgcgttcaaatactttgcgatcgtgttgcgcgcctgcccggtgcgtcggctgatctcacggatcgactgcttctctcgcaacgccatccgacggatgatgtttaaaagtcccatgtggatcactccgttgccccgtcgctcaccgtgttggggggaaggtgcacatggctcagttctcaatggaaattatctgcctaaccggctcagttctgcgtagaaaccaacatgcaagctccaccgggtgcaaagcggcagcggcggcaggatatattcaattgtaaatggcttcatgtccgggaaatctacatggatcagcaatgagtatgatggtcaatatggagaaaaagaaagagtaattaccaattttttttcaattcaaaaatgtagatgtccgcagcgttattataaaatgaaagtacattttgataaaacgacaaattacgatccgtcgtatttataggcgaaagcaataaacaaattattctaattcggaaatctttatttcgacgtgtctacattcacgtccaaatgggggcttagatgagaaacttcacgatcgatgccttgatttcgccattcccagatacccatttcatcttcagattggtctgagattatgcgaaaatatacactcatatacataaatactgacagtttgagctaccaattcagtgtagcccattacctcacataattcactcaaatgctaggcagtctgtcaactcggcgtcaatttgtcggccactatacgatagttgcgcaaattttcaaagtcctggcctaacatcacacctctgtcggcggcgggtcccatttgtgataaatccaccatatcgaattaattcagactcctttgccccagagatcacaatggacgacttcctctatctctacgatctagtcaggaagttcgacggagaaggtgacgataccatgttcaccactgataatgagaagattagccttttcaatttcagaaagaatgctaacccacagatggttagagaggcttacgcagcaggtctcatcaagacgatctacccgagcaataatctccaggagatcaaataccttcccaagaaggttaaagatgcagtcaaaagattcaggactaactgcatcaagaacacagagaaagatatatttctcaagatcagaagtactattccagtatggacgattcaaggcttgcttcacaaaccaaggcaagtaatagagattggagtctctaaaaaggtagttcccactgaatcaaaggccatggagtcaaagattcaaatagaggacctaacagaactcgccgtaaagactggcgaacagttcatacagagtctcttacgactcaatgacaagaagaaaatcttcgtcaacatggtggagcacgacacgcttgtctactccaaaaatatcaaagatacagtctcagaagaccaaagggcaattgagacttttcaacaaagggtaatatccggaaacctcctcggattccattgcccagctatctgtcactttattgtgaagatagtggaaaaggaaggtggctcctacaaatgccatcattgcgataaaggaaaggccatcgttgaagatgcctctgccgacagtggtcccaaagatggacccccacccacgaggagcatcgtggaaaaagaagacgttccaaccacgtcttcaaagcaagtggattgatgtgatatctccactgacgtaagggatgacgcacaatcccactatccttcgcaagacccttcctctatataaggaagttcatttcatttggagaggacacgctgaaatcaccagtctccaagcttgcggggatcgtttcgcatgattgaacaagatggattgcacgcaggttctccggccgcttgggtggagaggctattcggctatgactgggcacaacagacaatcggctgctctgatgccgccgtgttccggctgtcagcgcaggggcgcccggttctttttgtcaagaccgacctgtccggtgccctgaatgaactgcaggacgaggcagcgcggctatcgtggctggccacgacgggcgttccttgcgcagctgtgctcgacgttgtcactgaagcgggaagggactggctgctattgggcgaagtgccggggcaggatctcctgtcatctcaccttgctcctgccgagaaagtatccatcatggctgatgcaatgcggcggctgcatacgcttgatccggctacctgcccattcgaccaccaagcgaaacatcgcatcgagcgagcacgtactcggatggaagccggtcttgtcgatcaggatgatctggacgaagagcatcaggggctcgcgccagccgaactgttcgccaggctcaaggcgcgcatgcccgacggcgaggatctcgtcgtgacccatggcgatgcctgcttgccgaatatcatggtggaaaatggccgcttttctggattcatcgactgtggccggctgggtgtggcggaccgctatcaggacatagcgttggctacccgtgatattgctgaagagcttggcggcgaatgggctgaccgcttcctcgtgctttacggtatcgccgctcccgattcgcagcgcatcgccttctatcgccttcttgacgagttcttctgagcgggactctggggttcgaaatgaccgaccaagcgacgcccaacctgccatcacgagatttcgattccaccgccgccttctatgaaaggttgggcttcggaatcgttttccgggacgccggctggatgatcctccagcgcggggatctcatgctggagttcttcgcccaccccggatcgatccaacacttacgtttgcaacgtccaagagcaaatagaccacgaacgccggaaggttgccgcagcgtgtggattgcgtctcaattctctcttgcaggaatgcaatgatgaatatgatactgactatgaaactttgagggaatactgcctagcaccgtcacctcataacgtgcatcatgcatgccctgacaacatggaacatcgctatttttctgaagaattatgctcgttggaggatgtcgcggcaattgcagctattgccaacatcgaactacccctcacgcatgcattcatcaatattattcatgcggggaaaggcaagattaatccaactggcaaatcatccagcgtgattggtaacttcagttccagcgacttgattcgttttggtgctacccacgttttcaataaggacgagatggtggagtaaagaaggagtgcgtcgaagcagatcgttcaaacatttggcaataaagtttcttaagattgaatcctgttgccggtcttgcgatgattatcatataatttctgttgaattacgttaagcatgtaataattaacatgtaatgcatgacgttatttatgagatgggtttttatgattagagtcccgcaattatacatttaatacgcgatagaaaacaaaatatagcgcgcaaactaggataaattatcgcgcgcggtgtcatctatgttactagatcgatcaaacttcggtactgtgtaatgacgatgagcaatcgagaggctgactaacaaaaggtacatcgcgatggatcgatccattcgccattcaggctgcgcaactgttgggaagggcgatcggtgcgggcctcttcgctattacgccagctggcgaaagggggatgtgctgcaaggcgattaagttgggtaacgccagggttttcccagtcacgacgttgtaaaacgacggccagtgaattcctgcagcccgggggatccgcccactcgaggcgcgccgtcgacggatataatgagccgtaaacaaagatgattaagtagtaattaatacgtactagtaaaagtggcaaaagataacgagaaagaaccaatttctttgcattcggccttagcggaaggcatatataagctttgattattttatttagtgtaatgatttcgtacaaccaaagcatttatttagtactctcacacttgtgtcgcggccggccgctacaggaacaggtggtggcggccctcggcgcgctcgtactgctccacgatggtgtagtcctcgttgtgggaggtgatgtccagcttggagtccacgtagtagtagccgggcagctgcacgggcttcttggccatgtagatggacttgaactccaccaggtagtggccgccgtccttcagcttcagggccttgtggatctcgcccttcagcacgccgtcgcgggggtacaggcgctcggtggaggcctcccagcccatagtcttcttctgcattacggggccgtcggaggggaagttcacgccgatgaacttcaccttgtagatgaaggagccgtcctgcagggaggagtcctgggtcacggtcaccacgccgccgtcctcgaagttcatcacgcgctcccacttgaagccctcggggaaggacagcttcttgtagtcggggatgtcggcggggtgcttcacgtacaccttggagccgtactggaactggggggacaggatgtcccaggcgaagggcagggggccgcccttggtcaccttcagcttggcggtctgggtgccctcgtaggggcggccctcgccctcgccctcgatctcgaactcgtggccgttcacggagccctccatgcgcaccttgaagcgcatgaactccttgatgacgtcctcggaggaggccatgggccgcttggggggctatggaagactttcttagttagttgtgtgaataagcaatgttgggagaatcgggactacttataggataggaataaaacagaaaagtattaagtgctaatgaaatatttagactgataattaaaatcttcacgtatgtccacttgatataaaaacgtcaggaataaaggaagtacagtagaatttaaaggtactctttttatatatacccgtgttctctttttggctagctagttgcataaaaaataatctatatttttatcattattttaaatatcttatgagatggtaaatatttatcataattttttttactattatttattatttgtgtgtgtaatacatatagaagttaattacaaattttatttactttttcattattttgatatgattcaccattaatttagtgttattatttataatagttcattttaatctttttgtatatattatgcgtgcagtacttttttcctacatataactactattacattttatttatataatatttttattaatgaattttcgtgataatatgtaatattgttcattattatttcagattttttaaaaatatttgtgttattatttatgaaatatgtaatttttttagtatttgattttatgatgataaagtgttctaaattcaaaagaagggggaaagcgtaaacattaaaaaacgtcatcaaacaaaaacaaaatcttgttaataaagataaaactgtttgttttgatcactgttatttcgtaatataaaaacattatttatatttatattgttgacaaccaaatttgcctatcaaatctaaccaatataatgcatgcgtggcaggtaatgtactaccatgaacttaagtcatgacataataaaccgtgaatctgaccaatgcatgtacctanctaaattgtatttgtgacacgaagcaaatgattcaattcacaatggagatgggaaacaaataatgaagaacccagaactaagaaagcttttctgaaaaataaaataaaggcaatgtcaaaagtatactgcatcatcagtccagaaagcacatgatatttttttatcagtatcaatgcagctagttttattttacaatatcgatatagctagtttaaatatattgcagctagatttataaatatttgtgttattatttatcatttgtgtaatcctgtttttagtattttagtttatatatgatgataatgtattccaaatttaaaagaagggaaataaatttaaacaagaaaaaaagtcatcaaacaaaaaacaaatgaaagggtggaaagatgttaccatgtaatgtgaatgttacagtatttcttttattatagagttaacaaattaactaatatgattttgttaataatgataaaatattttttttattattatttcataatataaaaatagtttacttaatataaaaaaaattctatcgttcacaacaaagttggccacctaatttaaccatgcatgtacccatggaccatattaggtaaccatcaaacctgatgaagagataaagagatgaagacttaagtcataacacaaaaccataaaaaacaaaaatacaatcaaccgtcaatctgaccaatgcatgaaaaagctgcaatagtgagtggcgacacaaagcacatgattttcttacaacggagataaaaccaaaaaaatatttcatgaacaacctagaacaaataaagcttttatataataaatatataaataaataaaggctatggaataatatacttcaatatatttggattaaataaattgttggcggggttgatatatttatacacacctaaagtcacttcaatctcattttcacttaacttttattttttttttctttttatttatcataaagagaatattgataatatactttttaacatatttttatgacattttttattggtgaaaacttattaaaaatcataaattttgtaagttagatttatttaaagagttcctcttcttattttaaattttttaataaatttttaaataactaaaatttgtgttaaaaatgttaaaaaagtgtgttattaacccttctcttcgaggatccgtaccgagctcggatccactagtaacggccgccagtgtgctggaattcaggtcctgcaggtctactctttacatgttctttactccgtctcaaaatttcctttttttgttggctctctccgaacgagttggagaaatcgttaaccctaatcgaagatctagattcctctacatacgtttgatctctctctcagtatggattacaaagcgccaaggagatactactcacacggagttgttgcgagacagcaagatttcgcaacagatatagttacgagaagaagaccttatgtcccttacgaccgtccaaataagttttcaaggagtctggtttggacgtcaaaagagtacaaatcacccgagggcaataatatgccaaggaccaatgatgtgtcaccgaaaccaccagttttaggtttggcgaggaagaatgctgcttgtgggccaatgagatcttctagtctcagaaaatgggtatgtaagtattggaaagatggaaagtgcaagaggggtgagcagtgccagttcttacactcttggtcttgtttccctggattggccatggtagcttctcttgaagggcacaataaggaactaaaggggatcgctctccctgagggttcagataaactcttttcagtcagtattgatggtacattgcgagtttgggactgcaattctggtcagtgtgtacattccatcaaccttgacgcagaagcagggtctctaatcagtgaaggcccttgggttttccttggcttgccaaacgctataaaggcttttaacgttcaaaccagtcaagatttgcatcttcaagcagcaggggtggttggtcaggtgaatgcaatgactattgcaaacggaatgctttttgctggaacaagttctggtagtatcttagtctggaaagctactacagactctgagtctgatccattcaaatacttgacatctcttgagggacatagtggtgaagtcacttgttttgctgttggaggtcaaatgctatactctggttctgtcgataaaacaatcaagatgtgggatctcaacaccctgcaatgtataatgaccctgaagcaacataccggcactgtcacttcactcttatgttgggataaatgtttgatatcgtcttccttggatgggaccataaaagtttgggcttattctgaaaacggaatcttgaaagttgttcaaactcgcagacaagaacagagtagtgttcatgctctttctggtatgcatgatgcagaagccaaaccgataatattctgctcttaccaaaacggaaccgttggcattttcgacctaccatcttttcaagaaagaggaaggatgttctctacgcacacgatcgccacactcacaattggtcctcaaggattgttattcagtggagacgagagtggtaacttgcgtgtatggaccttagctgctggcaacaaagtttagtcttttcgactaaagaattctgatttaattttgtggtttatatgttgagttaactgttaagagagttttattttgtaataggtgtatcagtcaataaacaatctttgtatcaaccaaatgtaatttttctcgttaattcgatttcagagtttttactttaagataaacaaactctttcacacatcatttaatgaaagtggagaagcttaaaaaacaaacaaagaaactgatccatttttggcgggtcttcttctactcttattcatatgtgttaacgaactatagcgtaaaattcagagcaagcgatctccgatttgaacgtggctatcaccggaggcccaccactacgggcgatacgctctaagtgaggattaaagtgctctggtggtgacgttgaagaaactcgcccatggtttttgttatctctgcagccaagtgtcgttctttcttcgccacttctcatcaagctacagtgaatttaaaaatggcgtctttctttgatctcgtatacataagctggattggtttcttaaacaaattcctctccttttgggtcttctgggtttgccttgtaagtgtttgtgtttttgcctctgagaaaaaatcgcggccgcatggagagatctcaacggcagtctcctccgccaccgtcgccgtcctcctcctcgtcctccgtctccgcggacaccgtcctcgtccctcccggaaagaggcggagggcggcgacggccaaggccggcgccgagcctaataagaggatccgcaaggaccccgccgccgccgccgcggggaagaggagctccgtctacaggggagtcaccaggcacaggtggacgggcaggttcgaggcgcatctctgggacaagcactgcctcgccgcgctccacaacaagaagaaaggcaggcaagtctacctgggggcgtatgacagcgaggaggcagctgctcgtgcctatgacctcgcagctctcaagtactggggtcctgagactctgctcaacttccctgtggaggattactccagcgagatgccggagatggaggccgtgtcccgggaggagtacctggcctccctccgccgcaggagcagcggcttctccaggggcgtctccaagtacagaggcgtcgccaggcatcaccacaacgggaggtgggaggcacggattgggcgagtctttgggaacaagtacctctacttgggaacatttgacactcaagaagaggcagccaaggcctatgaccttgcggccattgaataccgtggcgtcaatgctgtaaccaacttcgacatcagctgctacctggaccacccgctgttcctggcacagctccaacaggagccacaggtggtgccggcactcaaccaagaacctcaacctgatcagagcgaaaccggaactacagagcaagagccggagtcaagcgaagccaagacaccggatggcagtgcagaacccgatgagaacgcggtgcctgacgacaccgcggagcccctcaccacagtcgacgacagcatcgaagagggcttgtggagcccttgcatggattacgagctagacaccatgtcgagaccaaactttggcagctcaatcaatctgagcgagtggttcgctgacgcagacttcgactgcaacatcggatgcctgttcgatgggtgttctgcggctgacgaaggaagcaaggatggtgtaggtctggcagatttcagtctgtttgaggcaggtgatgtccagctgaaggatgttctttcggatatggaagaggggatacaacctccagcgatgatcagtgtgtgcaacgcggccgcaagtatgaactaaaatgcatgtaggtgtaagagctcatggagagcatggaatattgtatccgaccatgtaacagtataataactgagctccatctcacttcttctatgaataaacaaaggatgttatgatatattaacactctatctatgcaccttattgttctatgataaatttcctcttattattataaatcatctgaatcgtgacggcttatggaatgcttcaaatagtacaaaaacaaatgtgtactataagactttctaaacaattctaaccttagcattgtgaacgagacataagtgttaagaagacataacaattataatggaagaagtttgtctccatttatatattatatattacccacttatgtattatattaggatgttaaggagacataacaattataaagagagaagtttgtatccatttatatattatatactacccatttatatattatacttatccacttatttaatgtctttataaggtttgatccatgatatttctaatattttagttgatatgtatatgaaagggtactatttgaactctcttactctgtataaaggttggatcatccttaaagtgggtctatttaattttattgcttcttacagataaaaaaaaaattatgagttggtttgataaaatattgaaggatttaaaataataataaataacatataatatatgtatataaatttattataatataacatttatctataaaaaagtaaatattgtcataaatctatacaatcgtttagccttgctggacgaatctcaattatttaaacgagagtaaacatatttgactttttggttatttaacaaattattatttaacactatatgaaatttttttttttatcagcaaagaataaaattaaattaagaaggacaatggtgtcccaatccttatacaaccaacttccacaagaaagtcaagtcagagacaacaaaaaaacaagcaaaggaaattttttaatttgagttgtcttgtttgctgcataatttatgcagtaaaacactacacataacccttttagcagtagagcaatggttgaccgtgtgcttagcttcttttattttatttttttatcagcaaagaataaataaaataaaatgagacacttcagggatgtttcaacaagctctagagggcccaattcgccctatagtgagtcgtattacaattcactggccgtcgttttacaacgtcgtgactgggaaaaccctggcgttacccaacttaatcgccttgcagcacatccccctttcgccagctggcgtaatagcgaagaggcccgcaccgatcgcccttcccaacagttgcgcagcctatacgtacgagatccggccggccagatcctgcaggagatccaagcttgg

SEQ ID NO: 29 - DNA, 4906 bp, Artificial Sequence
  vector pKR268
ggccgcatgagccgtaaaggttcaatacaacgagtgcttgttttcttagggacaagcattgtacttatgtatgattctgtgtaaccatgagtcttccacgttgtactaatgtgaagggcaaaaataaaacacagaacaagttcgtttttctcaaataatgtgaaggtagaaaatggaaccatgcctcctctcttgcatgtgatttaaaatattagcagatggtaccgtacgtgggcggatcccccgggctgcaggaattcactggccgtcgttttacaacgtcgtgactgggaaaaccctggcgttacccaacttaatcgccttgcagcacatccccctttcgccagctggcgtaatagcgaagaggcccgcaccgatcgcccttcccaacagttgcgcagcctgaatggcgaatggcgcctgatgcggtattttctccttacgcatctgtgcggtatttcacaccgcatatggtgcactctcagtacaatctgctctgatgccgcatagttaagccagccccgacacccgccaacacccgctgacgcgccctgacgggcttgtctgctcccggcatccgcttacagacaagctgtgaccgtctccgggagctgcatgtgtcagaggttttcaccgtcatcaccgaaacgcgcgagacgaaagggcctcgtgatacgcctatttttataggttaatgtcatgataataatggtttcttagacgtcaggtggcacttttcggggaaatgtgcgcggaacccctatttgtttatttttctaaatacattcaaatatgtatccgctcatgagacaataaccctgataaatgcttcaataatattgaaaaaggaagagtatgagtattcaacatttccgtgtcgcccttattcccttttttgcggcattttgccttcctgtttttgctcacccagaaacgctggtgaaagtaaaagatgctgaagatcagttgggtgcacgagtgggttacatcgaactggatctcaacagcggtaagatccttgagagttttcgccccgaagaacgttttccaatgatgagcacttttaaagttctgctatgtggcgcggtattatcccgtattgacgccgggcaagagcaactcggtcgccgcatacactattctcagaatgacttggttgagtactcaccagtcacagaaaagcatcttacggatggcatgacagtaagagaattatgcagtgctgccataaccatgagtgataacactgcggccaacttacttctgacaacgatcggaggaccgaaggagctaaccgcttttttgcacaacatgggggatcatgtaactcgccttgatcgttgggaaccggagctgaatgaagccataccaaacgacgagcgtgacaccacgatgcctgtagcaatggcaacaacgttgcgcaaactattaactggcgaactacttactctagcttcccggcaacaattaatagactggatggaggcggataaagttgcaggaccacttctgcgctcggcccttccggctggctggtttattgctgataaatctggagccggtgagcgtgggtctcgcggtatcattgcagcactggggccagatggtaagccctcccgtatcgtagttatctacacgacggggagtcaggcaactatggatgaacgaaatagacagatcgctgagataggtgcctcactgattaagcattggtaactgtcagaccaagtttactcatatatactttagattgatttaaaacttcatttttaatttaaaaggatctaggtgaagatcctttttgataatctcatgaccaaaatcccttaacgtgagttttcgttccactgagcgtcagaccccgtagaaaagatcaaaggatcttcttgagatcctttttttctgcgcgtaatctgctgcttgcaaacaaaaaaaccaccgctaccagcggtggtttgtttgccggatcaagagctaccaactctttttccgaaggtaactggcttcagcagagcgcagataccaaatactgtccttctagtgtagccgtagttaggccaccacttcaagaactctgtagcaccgcctacatacctcgctctgctaatcctgttaccagtggctgctgccagtggcgataagtcgtgtcttaccgggttggactcaagacgatagttaccggataaggcgcagcggtcgggctgaacggggggttcgtgcacacagcccagcttggagcgaacgacctacaccgaactgagatacctacagcgtgagctatgagaaagcgccacgcttcccgaagggagaaaggcggacaggtatccggtaagcggcagggtcggaacaggagagcgcacgagggagcttccagggggaaacgcctggtatctttatagtcctgtcgggtttcgccacctctgacttgagcgtcgatttttgtgatgctcgtcaggggggcggagcctatggaaaaacgccagcaacgcggcctttttacggttcctggccttttgctggccttttgctcacatgttctttcctgcgttatcccctgattctgtggataaccgtattaccgcctttgagtgagctgataccgctcgccgcagccgaacgaccgagcgcagcgagtcagtgagcgaggaagcggaagagcgcccaatacgcaaaccgcctctccccgcgcgttggccgattcattaatgcagctggcacgacaggtttcccgactggaaagcgggcagtgagcgcaacgcaattaatgtgagttagctcactcattaggcaccccaggctttacactttatgcttccggctcgtatgttgtgtggaattgtgagcggataacaatttcacacaggaaacagctatgaccatgattacgccaagcttgcatgcctgcaggtcgactcgacgtacgatcccacatgcaagtttttatttcaatcccttttcctttgaataactgaccaagaacaacaagaaaaaaaaaaaaaaagaaaaggatcattttgaaaggatatttttcgctcctattcaaatactgtatttttaccaaaaaaactgtatttttcctacactctcaagctttgtttttcgcttcgactctcatgatttccttcatatgccaatcactctatttataaatggcataaggtagtgtgaacaattgcaaagcttgtcatcaaaagcttgcaatgtacaaattaatgtttttcatgcctttcaaaattatctgcaccccctagctattaatctaacatctaagtaaggctagtgaattttttcgaatagtcatgcagtgcattaatttccccgtgactattttggctttgactccaacactggccccgtacatccgtccctcattacatgaaaagaaatattgtttatattcttaattaaaaatattgtcccttctaaattttcatatagttaattattatattacttttttctctattctattagttctattttcaaattattatttatgcatatgtaaagtacattatatttttgctatatacttaaatatttctaaattattaaaaaaagactgatatgaaaaatttattctttttaaagctatatcattttatatatactttttcttttcttttctttcattttctattcaatttaataagaaataaattttgtaaatttttatttatcaatttataaaaatattttactttatatgttttttcacatttttgttaaacaaatcatatcattatgattgaaagagaggaaattgacagtgagtaataagtgatgagaaaaaaatgtgttatttcctaaaaaaaacctaaacaaacatgtatctactctctatttcatctatctctcatttcatttttctctttatctctttctttatttttttatcatatcatttcacattaattatttttactctctttattttttctctctatccctctcttatttccactcatatatacactccaaaattggggcatgcctttatcactactctatctcctccactaaatcatttaaatgaaactgaaaagcattggcaagtctcctcccctcctcaagtgatttccaactcagcattggcatctaattgattcagtatatctattgcatgtgtaaaagtctttccacaatacataactattaattaatcttaaataaataaaggataaaatatttttttttcttcataaaattaaaatatgttattttttgtttagatgtatattcgaataaatctaaatatatgataatgattttttatattgattaaacatataatcaatattaaatatgatatttttttatataggttgtacacataattttataaggataaaaaatatgataaaaataaattttaaatatttttatatttacgagaaaaaaaaatattttagccataaataaatgaccagcatattttacaaccttagtaattcataaattcctatatgtatatttgaaattaaaaacagataatcgttaagggaaggaatcctacgtcatctcttgccatttgtttttcatgcaaacagaaagggacgaaaaaccacctcaccatgaatcactcttcacaccatttttactagcaaacaagtctcaacaactgaagccagctctctttccgtttctttttacaacactttctttgaaatagtagtatttttttttcacatgatttattaacgtgccaaaagatgcttattgaatagagtgcacatttgtaatgtactactaattagaacatgaaaaagcattgttctaacacgataatcctgtgaaggcgttaactccaaagatccaatttcactatataaattgtgacgaaagcaaaatgaattcacatagctgagagagaaaggaaaggttaactaagaagcaatacttcagc

SEQ ID NO: 30 - DNA, 10528 bp, Artificial Sequence
  vector pKR1143
  misc_feature (7136)..(7136): n is a, c, g, or t
gtacgagatccggccggccagatcctgcaggagatccaagcttggcgcgccgttctatagtgtcacctaaatcgtatgtgtatgatacataaggttatgtattaattgtagccgcgttctaacgacaatatgtccatatggtgcactctcagtacaatctgctctgatgccgcatagttaagccagccccgacacccgccaacacccgctgacgcgccctgacgggcttgtctgctcccggcatccgcttacagacaagctgtgaccgtctccgggagctgcatgtgtcagaggttttcaccgtcatcaccgaaacgcgcgagacgaaagggcctcgtgatacgcctatttttataggttaatgtcatgaccaaaatcccttaacgtgagttttcgttccactgagcgtcagaccccgtagaaaagatcaaaggatcttcttgagatcctttttttctgcgcgtaatctgctgcttgcaaacaaaaaaaccaccgctaccagcggtggtttgtttgccggatcaagagctaccaactctttttccgaaggtaactggcttcagcagagcgcagataccaaatactgtccttctagtgtagccgtagttaggccaccacttcaagaactctgtagcaccgcctacatacctcgctctgctaatcctgttaccagtggctgctgccagtggcgataagtcgtgtcttaccgggttggactcaagacgatagttaccggataaggcgcagcggtcgggctgaacggggggttcgtgcacacagcccagcttggagcgaacgacctacaccgaactgagatacctacagcgtgagcattgagaaagcgccacgcttcccgaagggagaaaggcggacaggtatccggtaagcggcagggtcggaacaggagagcgcacgagggagcttccagggggaaacgcctggtatctttatagtcctgtcgggtttcgccacctctgacttgagcgtcgatttttgtgatgctcgtcaggggggcggagcctatggaaaaacgccagcaacgcggcctttttacggttcctggccttttgctggccttttgctcacatgttctttcctgcgttatcccctgattctgtggataaccgtattaccgcctttgagtgagctgataccgctcgccgcagccgaacgaccgagcgcagcgagtcagtgagcgaggaagcggaagagcgcccaatacgcaaaccgcctctccccgcgcgttggccgattcattaatgcaggttgatcgattcgacatcgatctagtaacatagatgacaccgcgcgcgataatttatcctagtttgcgcgctatattttgttttctatcgcgtattaaatgtataattgcgggactctaatcataaaaacccatctcataaataacgtcatgcattacatgttaattattacatgcttaacgtaattcaacagaaattatatgataatcatcgcaagaccggcaacaggattcaatcttaagaaactttattgccaaatgtttgaacgatctgcttcgacgcactccttctttaggtacctcactattcctttgccctcggacgagtgctggggcgtcggtttccactatcggcgagtacttctacacagccatcggtccagacggccgcgcttctgcgggcgatttgtgtacgcccgacagtcccggctccggatcggacgattgcgtcgcatcgaccctgcgcccaagctgcatcatcgaaattgccgtcaaccaagctctgatagagttggtcaagaccaatgcggagcatatacgcccggagccgcggcgatcctgcaagctccggatgcctccgctcgaagtagcgcgtctgctgctccatacaagccaaccacggcctccagaagaagatgttggcgacctcgtattgggaatccccgaacatcgcctcgctccagtcaatgaccgctgttatgcggccattgtccgtcaggacattgttggagccgaaatccgcgtgcacgaggtgccggacttcggggcagtcctcggcccaaagcatcagctcatcgagagcctgcgcgacggacgcactgacggtgtcgtccatcacagtttgccagtgatacacatggggatcagcaatcgcgcatatgaaatcacgccatgtagtgtattgaccgattccttgcggtccgaatgggccgaacccgctcgtctggctaagatcggccgcagcgatcgcatccatggcctccgcgaccggctgcagaacagcgggcagttcggtttcaggcaggtcttgcaacgtgacaccctgtgcacggcgggagatgcaataggtcaggctctcgctgaattccccaatgtcaagcacttccggaatcgggagcgcggccgatgcaaagtgccgataaacataacgatctttgtagaaaccatcggcgcagctatttacccgcaggacatatccacgccctcctacatcgaagctgaaagcacgagattcttcgccctccgagagctgcatcaggtcggagacgctgtcgaacttttcgatcagaaacttctcgacagacgtcgcggtgagttcaggctttttcatggtttaataagaagagaaaagagttcttttgttatggctgaagtaatagagaaatgagctcgagcgtgtcctctccaaatgaaatgaacttccttatatagaggaagggtcttgcgaaggatagtgggattgtgcgtcatcccttacgtcagtggagatgtcacatcaatccacttgctttgaagacgtggttggaacgtcttctttttccacgatgctcctcgtgggtgggggtccatctttgggaccactgtcggcagaggcatcttgaatgatagcctttcctttatcgcaatgatggcatttgtaggagccaccttccttttctactgtcctttcgatgaagtgacagatagctgggcaatggaatccgaggaggtttcccgaaattatcctttgttgaaaagtctcaatagccctttggtcttctgagactgtatctttgacatttttggagtagaccagagtgtcgtgctccaccatgttgacgaagattttcttcttgtcattgagtcgtaaaagactctgtatgaactgttcgccagtcttcacggcgagttctgttagatcctcgatttgaatcttagactccatgcatggccttagattcagtaggaactacctttttagagactccaatctctattacttgccttggtttatgaagcaagccttgaatcgtccatactggaatagtacttctgatcttgagaaatatgtctttctctgtgttcttgatgcaattagtcctgaatcttttgactgcatctttaaccttcttgggaaggtatttgatctcctggagattgttactcgggtagatcgtcttgatgagacctgctgcgtaggcctctctaaccatctgtgggtcagcattctttctgaaattgaagaggctaaccttctcattatcagtggtgaacatagtgtcgtcaccttcaccttcgaacttccttcctagatcgtaaagatagaggaaatcgtccattgtaatctccggggcaaaggagatctcttttggggctggatcactgctgggccttttggttcctagcgtgagccagtgggctttttgctttggtgggcttgttagggccttagcaaagctcttgggcttgagttgagcttctcctttggggatgaagttcaacctgtctgtttgctgacttgttgtgtacgcgtcagctgctgctcttgcctctgtaatagtggcaaatttcttgtgtgcaactccgggaacgccgtttgttgccgcctttgtacaaccccagtcatcgtatataccggcatgtggaccgttatacacaacgtagtagttgatatgagggtgttgaatacccgattctgctctgagaggagcaactgtgctgttaagctcagatttttgtgggattggaattggatcgatctcgatcccgcgaaattaatacgactcactatagggagaccacaacggtttccctctagaaataattttgtttaactttaagaaggagatatacccatggaaaagcctgaactcaccgcgacgtctgtcgagaagtttctgatcgaaaagttcgacagcgtctccgacctgatgcagctctcggagggcgaagaatctcgtgctttcagcttcgatgtaggagggcgtggatatgtcctgcgggtaaatagctgcgccgatggtttctacaaagatcgttatgtttatcggcactttgcatcggccgcgctcccgattccggaagtgcttgacattggggaattcagcgagagcctgacctattgcatctcccgccgtgcacagggtgtcacgttgcaagacctgcctgaaaccgaactgcccgctgttctgcagccggtcgcggaggctatggatgcgatcgctgcggccgatcttagccagacgagcgggttcggcccattcggaccgcaaggaatcggtcaatacactacatggcgtgatttcatatgcgcgattgctgatccccatgtgtatcactggcaaactgtgatggacgacaccgtcagtgcgtccgtcgcgcaggctctcgatgagctgatgctttgggccgaggactgccccgaagtccggcacctcgtgcacgcggatttcggctccaacaatgtcctgacggacaatggccgcataacagcggtcattgactggagcgaggcgatgttcggggattcccaatacgaggtcgccaacatcttcttctggaggccgtggttggcttgtatggagcagcagacgcgctacttcgagcggaggcatccggagcttgcaggatcgccgcggctccgggcgtatatgctccgcattggtcttgaccaactctatcagagcttggttgacggcaatttcgatgatgcagcttgggcgcagggtcgatgcgacgcaatcgtccgatccggagccgggactgtcgggcgtacacaaatcgcccgcagaagcgcggccgtctggaccgatggctgtgtagaagtactcgccgatagtggaaaccgacgccccagcactcgtccgagggcaaaggaatagtgaggtacagcttggatcgatccggctgctaacaaagcccgaaaggaagctgagttggctgctgccaccgctgagcaataactagcataaccccttggggcctctaaacgggtcttgaggggttttttgctgaaaggaggaactatatccggatgatcgggcgcgccgtcgacggatccactagttctagagcggcccgcgccgtcgacggatataatgagccgtaaacaaagatgattaagtagtaattaatacgtactagtaaaagtggcaaaagataacgagaaagaaccaatttctttgcattcggccttagcggaaggcatatataagctttgattattttatttagtgtaatgatttcgtacaaccaaagcatttatttagtactctcacacttgtgtcgcggccggccgctacaggaacaggtggtggcggccctcggcgcgctcgtactgctccacgatggtgtagtcctcgttgtgggaggtgatgtccagcttggagtccacgtagtagtagccgggcagctgcacgggcttcttggccatgtagatggacttgaactccaccaggtagtggccgccgtccttcagcttcagggccttgtggatctcgcccttcagcacgccgtcgcgggggtacaggcgctcggtggaggcctcccagcccatagtcttcttctgcattacggggccgtcggaggggaagttcacgccgatgaacttcaccttgtagatgaaggagccgtcctgcagggaggagtcctgggtcacggtcaccacgccgccgtcctcgaagttcatcacgcgctcccacttgaagccctcggggaaggacagcttcttgtagtcggggatgtcggcggggtgcttcacgtacaccttggagccgtactggaactggggggacaggatgtcccaggcgaagggcagggggccgcccttggtcaccttcagcttggcggtctgggtgccctcgtaggggcggccctcgccctcgccctcgatctcgaactcgtggccgttcacggagccctccatgcgcaccttgaagcgcatgaactccttgatgacgtcctcggaggaggccatgggccgcttggggggctatggaagactttcttagttagttgtgtgaataagcaatgttgggagaatcgggactacttataggataggaataaaacagaaaagtattaagtgctaatgaaatatttagactgataattaaaatcttcacgtatgtccacttgatataaaaacgtcaggaataaaggaagtacagtagaatttaaaggtactctttttatatatacccgtgttctctttttggctagctagttgcataaaaaataatctatatttttatcattattttaaatatcttatgagatggtaaatatttatcataattttttttactattatttattatttgtgtgtgtaatacatatagaagttaattacaaattttatttactttttcattattttgatatgattcaccattaatttagtgttattatttataatagttcattttaatctttttgtatatattatgcgtgcagtacttttttcctacatataactactattacattttatttatataatatttttattaatgaattttcgtgataatatgtaatattgttcattattatttcagattttttaaaaatatttgtgttattatttatgaaatatgtaatttttttagtatttgattttatgatgataaagtgttctaaattcaaaagaagggggaaagcgtaaacattaaaaaacgtcatcaaacaaaaacaaaatcttgttaataaagataaaactgtttgttttgatcactgttatttcgtaatataaaaacattatttatatttatattgttgacaaccaaatttgcctatcaaatctaaccaatataatgcatgcgtggcaggtaatgtactaccatgaacttaagtcatgacataataaaccgtgaatctgaccaatgcatgtacctanctaaattgtatttgtgacacgaagcaaatgattcaattcacaatggagatgggaaacaaataatgaagaacccagaactaagaaagcttttctgaaaaataaaataaaggcaatgtcaaaagtatactgcatcatcagtccagaaagcacatgatatttttttatcagtatcaatgcagctagttttattttacaatatcgatatagctagtttaaatatattgcagctagatttataaatatttgtgttattatttatcatttgtgtaatcctgtttttagtattttagtttatatatgatgataatgtattccaaatttaaaagaagggaaataaatttaaacaagaaaaaaagtcatcaaacaaaaaacaaatgaaagggtggaaagatgttaccatgtaatgtgaatgttacagtatttcttttattatagagttaacaaattaactaatatgattttgttaataatgataaaatattttttttattattatttcataatataaaaatagtttacttaatataaaaaaaattctatcgttcacaacaaagttggccacctaatttaaccatgcatgtacccatggaccatattaggtaaccatcaaacctgatgaagagataaagagatgaagacttaagtcataacacaaaaccataaaaaacaaaaatacaatcaaccgtcaatctgaccaatgcatgaaaaagctgcaatagtgagtggcgacacaaagcacatgattttcttacaacggagataaaaccaaaaaaatatttcatgaacaacctagaacaaataaagcttttatataataaatatataaataaataaaggctatggaataatatacttcaatatatttggattaaataaattgttggcggggttgatatatttatacacacctaaagtcacttcaatctcattttcacttaacttttattttttttttctttttatttatcataaagagaatattgataatatactttttaacatatttttatgacattttttattggtgaaaacttattaaaaatcataaattttgtaagttagatttatttaaagagttcctcttcttattttaaattttttaataaatttttaaataactaaaatttgtgttaaaaatgttaaaaaagtgtgttattaacccttctcttcgaggatccgtacgatcccacatgcaagtttttatttcaatcccttttcctttgaataactgaccaagaacaacaagaaaaaaaaaaaaaaagaaaaggatcattttgaaaggatatttttcgctcctattcaaatactgtatttttaccaaaaaaactgtatttttcctacactctcaagctttgtttttcgcttcgactctcatgatttccttcatatgccaatcactctatttataaatggcataaggtagtgtgaacaattgcaaagcttgtcatcaaaagcttgcaatgtacaaattaatgtttttcatgcctttcaaaattatctgcaccccctagctattaatctaacatctaagtaaggctagtgaattttttcgaatagtcatgcagtgcattaatttccccgtgactattttggctttgactccaacactggccccgtacatccgtccctcattacatgaaaagaaatattgtttatattcttaattaaaaatattgtcccttctaaattttcatatagttaattattatattacttttttctctattctattagttctattttcaaattattatttatgcatatgtaaagtacattatatttttgctatatacttaaatatttctaaattattaaaaaaagactgatatgaaaaatttattctttttaaagctatatcattttatatatactttttcttttcttttctttcattttctattcaatttaataagaaataaattttgtaaatttttatttatcaatttataaaaatattttactttatatgttttttcacatttttgttaaacaaatcatatcattatgattgaaagagaggaaattgacagtgagtaataagtgatgagaaaaaaatgtgttatttcctaaaaaaaacctaaacaaacatgtatctactctctatttcatctatctctcatttcatttttctctttatctctttctttatttttttatcatatcatttcacattaattatttttactctctttattttttctctctatccctctcttatttccactcatatatacactccaaaattggggcatgcctttatcactactctatctcctccactaaatcatttaaatgaaactgaaaagcattggcaagtctcctcccctcctcaagtgatttccaactcagcattggcatctaattgattcagtatatctattgcatgtgtaaaagtctttccacaatacataactattaattaatcttaaataaataaaggataaaatatttttttttcttcataaaattaaaatatgttattttttgtttagatgtatattcgaataaatctaaatatatgataatgattttttatattgattaaacatataatcaatattaaatatgatatttttttatataggttgtacacataattttataaggataaaaaatatgataaaaataaattttaaatatttttatatttacgagaaaaaaaaatattttagccataaataaatgaccagcatattttacaaccttagtaattcataaattcctatatgtatatttgaaattaaaaacagataatcgttaagggaaggaatcctacgtcatctcttgccatttgtttttcatgcaaacagaaagggacgaaaaaccacctcaccatgaatcactcttcacaccatttttactagcaaacaagtctcaacaactgaagccagctctctttccgtttctttttacaacactttctttgaaatagtagtatttttttttcacatgatttattaacgtgccaaaagatgcttattgaatagagtgcacatttgtaatgtactactaattagaacatgaaaaagcattgttctaacacgataatcctgtgaaggcgttaactccaaagatccaatttcactatataaattgtgacgaaagcaaaatgaattcacatagctgagagagaaaggaaaggttaactaagaagcaatacttcagcggccgcatgagccgtaaaggttcaatacaacgagtgcttgttttcttagggacaagcattgtacttatgtatgattctgtgtaaccatgagtcttccacgttgtactaatgtgaagggcaaaaataaaacacagaacaagttcgtttttctcaaataatgtgaaggtagaaaatggaaccatgcctcctctcttgcatgtgatttaaaatattagcagatggtacc

SEQ ID NO: 31 - DNA, 11721 bp, Artificial Sequence
  vector pKR1147
  misc_feature (7362)..(7362): n is a, c, g, or t
ggccgcatgagccgtaaaggttcaatacaacgagtgcttgttttcttagggacaagcattgtacttatgtatgattctgtgtaaccatgagtcttccacgttgtactaatgtgaagggcaaaaataaaacacagaacaagttcgtttttctcaaataatgtgaaggtagaaaatggaaccatgcctcctctcttgcatgtgatttaaaatattagcagatggtaccgtacgagatccggccggccagatcctgcaggagatccaagcttggcgcgccgttctatagtgtcacctaaatcgtatgtgtatgatacataaggttatgtattaattgtagccgcgttctaacgacaatatgtccatatggtgcactctcagtacaatctgctctgatgccgcatagttaagccagccccgacacccgccaacacccgctgacgcgccctgacgggcttgtctgctcccggcatccgcttacagacaagctgtgaccgtctccgggagctgcatgtgtcagaggttttcaccgtcatcaccgaaacgcgcgagacgaaagggcctcgtgatacgcctatttttataggttaatgtcatgaccaaaatcccttaacgtgagttttcgttccactgagcgtcagaccccgtagaaaagatcaaaggatcttcttgagatcctttttttctgcgcgtaatctgctgcttgcaaacaaaaaaaccaccgctaccagcggtggtttgtttgccggatcaagagctaccaactctttttccgaaggtaactggcttcagcagagcgcagataccaaatactgtccttctagtgtagccgtagttaggccaccacttcaagaactctgtagcaccgcctacatacctcgctctgctaatcctgttaccagtggctgctgccagtggcgataagtcgtgtcttaccgggttggactcaagacgatagttaccggataaggcgcagcggtcgggctgaacggggggttcgtgcacacagcccagcttggagcgaacgacctacaccgaactgagatacctacagcgtgagcattgagaaagcgccacgcttcccgaagggagaaaggcggacaggtatccggtaagcggcagggtcggaacaggagagcgcacgagggagcttccagggggaaacgcctggtatctttatagtcctgtcgggtttcgccacctctgacttgagcgtcgatttttgtgatgctcgtcaggggggcggagcctatggaaaaacgccagcaacgcggcctttttacggttcctggccttttgctggccttttgctcacatgttctttcctgcgttatcccctgattctgtggataaccgtattaccgcctttgagtgagctgataccgctcgccgcagccgaacgaccgagcgcagcgagtcagtgagcgaggaagcggaagagcgcccaatacgcaaaccgcctctccccgcgcgttggccgattcattaatgcaggttgatcgattcgacatcgatctagtaacatagatgacaccgcgcgcgataatttatcctagtttgcgcgctatattttgttttctatcgcgtattaaatgtataattgcgggactctaatcataaaaacccatctcataaataacgtcatgcattacatgttaattattacatgcttaacgtaattcaacagaaattatatgataatcatcgcaagaccggcaacaggattcaatcttaagaaactttattgccaaatgtttgaacgatctgcttcgacgcactccttctttaggtacctcactattcctttgccctcggacgagtgctggggcgtcggtttccactatcggcgagtacttctacacagccatcggtccagacggccgcgcttctgcgggcgatttgtgtacgcccgacagtcccggctccggatcggacgattgcgtcgcatcgaccctgcgcccaagctgcatcatcgaaattgccgtcaaccaagctctgatagagttggtcaagaccaatgcggagcatatacgcccggagccgcggcgatcctgcaagctccggatgcctccgctcgaagtagcgcgtctgctgctccatacaagccaaccacggcctccagaagaagatgttggcgacctcgtattgggaatccccgaacatcgcctcgctccagtcaatgaccgctgttatgcggccattgtccgtcaggacattgttggagccgaaatccgcgtgcacgaggtgccggacttcggggcagtcctcggcccaaagcatcagctcatcgagagcctgcgcgacggacgcactgacggtgtcgtccatcacagtttgccagtgatacacatggggatcagcaatcgcgcatatgaaatcacgccatgtagtgtattgaccgattccttgcggtccgaatgggccgaacccgctcgtctggctaagatcggccgcagcgatcgcatccatggcctccgcgaccggctgcagaacagcgggcagttcggtttcaggcaggtcttgcaacgtgacaccctgtgcacggcgggagatgcaataggtcaggctctcgctgaattccccaatgtcaagcacttccggaatcgggagcgcggccgatgcaaagtgccgataaacataacgatctttgtagaaaccatcggcgcagctatttacccgcaggacatatccacgccctcctacatcgaagctgaaagcacgagattcttcgccctccgagagctgcatcaggtcggagacgctgtcgaacttttcgatcagaaacttctcgacagacgtcgcggtgagttcaggctttttcatggtttaataagaagagaaaagagttcttttgttatggctgaagtaatagagaaatgagctcgagcgtgtcctctccaaatgaaatgaacttccttatatagaggaagggtcttgcgaaggatagtgggattgtgcgtcatcccttacgtcagtggagatgtcacatcaatccacttgctttgaagacgtggttggaacgtcttctttttccacgatgctcctcgtgggtgggggtccatctttgggaccactgtcggcagaggcatcttgaatgatagcctttcctttatcgcaatgatggcatttgtaggagccaccttccttttctactgtcctttcgatgaagtgacagatagctgggcaatggaatccgaggaggtttcccgaaattatcctttgttgaaaagtctcaatagccctttggtcttctgagactgtatctttgacatttttggagtagaccagagtgtcgtgctccaccatgttgacgaagattttcttcttgtcattgagtcgtaaaagactctgtatgaactgttcgccagtcttcacggcgagttctgttagatcctcgatttgaatcttagactccatgcatggccttagattcagtaggaactacctttttagagactccaatctctattacttgccttggtttatgaagcaagccttgaatcgtccatactggaatagtacttctgatcttgagaaatatgtctttctctgtgttcttgatgcaattagtcctgaatcttttgactgcatctttaaccttcttgggaaggtatttgatctcctggagattgttactcgggtagatcgtcttgatgagacctgctgcgtaggcctctctaaccatctgtgggtcagcattctttctgaaattgaagaggctaaccttctcattatcagtggtgaacatagtgtcgtcaccttcaccttcgaacttccttcctagatcgtaaagatagaggaaatcgtccattgtaatctccggggcaaaggagatctcttttggggctggatcactgctgggccttttggttcctagcgtgagccagtgggctttttgctttggtgggcttgttagggccttagcaaagctcttgggcttgagttgagcttctcctttggggatgaagttcaacctgtctgtttgctgacttgttgtgtacgcgtcagctgctgctcttgcctctgtaatagtggcaaatttcttgtgtgcaactccgggaacgccgtttgttgccgcctttgtacaaccccagtcatcgtatataccggcatgtggaccgttatacacaacgtagtagttgatatgagggtgttgaatacccgattctgctctgagaggagcaactgtgctgttaagctcagatttttgtgggattggaattggatcgatctcgatcccgcgaaattaatacgactcactatagggagaccacaacggtttccctctagaaataattttgtttaactttaagaaggagatatacccatggaaaagcctgaactcaccgcgacgtctgtcgagaagtttctgatcgaaaagttcgacagcgtctccgacctgatgcagctctcggagggcgaagaatctcgtgctttcagcttcgatgtaggagggcgtggatatgtcctgcgggtaaatagctgcgccgatggtttctacaaagatcgttatgtttatcggcactttgcatcggccgcgctcccgattccggaagtgcttgacattggggaattcagcgagagcctgacctattgcatctcccgccgtgcacagggtgtcacgttgcaagacctgcctgaaaccgaactgcccgctgttctgcagccggtcgcggaggctatggatgcgatcgctgcggccgatcttagccagacgagcgggttcggcccattcggaccgcaaggaatcggtcaatacactacatggcgtgatttcatatgcgcgattgctgatccccatgtgtatcactggcaaactgtgatggacgacaccgtcagtgcgtccgtcgcgcaggctctcgatgagctgatgctttgggccgaggactgccccgaagtccggcacctcgtgcacgcggatttcggctccaacaatgtcctgacggacaatggccgcataacagcggtcattgactggagcgaggcgatgttcggggattcccaatacgaggtcgccaacatcttcttctggaggccgtggttggcttgtatggagcagcagacgcgctacttcgagcggaggcatccggagcttgcaggatcgccgcggctccgggcgtatatgctccgcattggtcttgaccaactctatcagagcttggttgacggcaatttcgatgatgcagcttgggcgcagggtcgatgcgacgcaatcgtccgatccggagccgggactgtcgggcgtacacaaatcgcccgcagaagcgcggccgtctggaccgatggctgtgtagaagtactcgccgatagtggaaaccgacgccccagcactcgtccgagggcaaaggaatagtgaggtacagcttggatcgatccggctgctaacaaagcccgaaaggaagctgagttggctgctgccaccgctgagcaataactagcataaccccttggggcctctaaacgggtcttgaggggttttttgctgaaaggaggaactatatccggatgatcgggcgcgccgtcgacggatccactagttctagagcggcccgcgccgtcgacggatataatgagccgtaaacaaagatgattaagtagtaattaatacgtactagtaaaagtggcaaaagataacgagaaagaaccaatttctttgcattcggccttagcggaaggcatatataagctttgattattttatttagtgtaatgatttcgtacaaccaaagcatttatttagtactctcacacttgtgtcgcggccggccgctacaggaacaggtggtggcggccctcggcgcgctcgtactgctccacgatggtgtagtcctcgttgtgggaggtgatgtccagcttggagtccacgtagtagtagccgggcagctgcacgggcttcttggccatgtagatggacttgaactccaccaggtagtggccgccgtccttcagcttcagggccttgtggatctcgcccttcagcacgccgtcgcgggggtacaggcgctcggtggaggcctcccagcccatagtcttcttctgcattacggggccgtcggaggggaagttcacgccgatgaacttcaccttgtagatgaaggagccgtcctgcagggaggagtcctgggtcacggtcaccacgccgccgtcctcgaagttcatcacgcgctcccacttgaagccctcggggaaggacagcttcttgtagtcggggatgtcggcggggtgcttcacgtacaccttggagccgtactggaactggggggacaggatgtcccaggcgaagggcagggggccgcccttggtcaccttcagcttggcggtctgggtgccctcgtaggggcggccctcgccctcgccctcgatctcgaactcgtggccgttcacggagccctccatgcgcaccttgaagcgcatgaactccttgatgacgtcctcggaggaggccatgggccgcttggggggctatggaagactttcttagttagttgtgtgaataagcaatgttgggagaatcgggactacttataggataggaataaaacagaaaagtattaagtgctaatgaaatatttagactgataattaaaatcttcacgtatgtccacttgatataaaaacgtcaggaataaaggaagtacagtagaatttaaaggtactctttttatatatacccgtgttctctttttggctagctagttgcataaaaaataatctatatttttatcattattttaaatatcttatgagatggtaaatatttatcataattttttttactattatttattatttgtgtgtgtaatacatatagaagttaattacaaattttatttactttttcattattttgatatgattcaccattaatttagtgttattatttataatagttcattttaatctttttgtatatattatgcgtgcagtacttttttcctacatataactactattacattttatttatataatatttttattaatgaattttcgtgataatatgtaatattgttcattattatttcagattttttaaaaatatttgtgttattatttatgaaatatgtaatttttttagtatttgattttatgatgataaagtgttctaaattcaaaagaagggggaaagcgtaaacattaaaaaacgtcatcaaacaaaaacaaaatcttgttaataaagataaaactgtttgttttgatcactgttatttcgtaatataaaaacattatttatatttatattgttgacaaccaaatttgcctatcaaatctaaccaatataatgcatgcgtggcaggtaatgtactaccatgaacttaagtcatgacataataaaccgtgaatctgaccaatgcatgtacctanctaaattgtatttgtgacacgaagcaaatgattcaattcacaatggagatgggaaacaaataatgaagaacccagaactaagaaagcttttctgaaaaataaaataaaggcaatgtcaaaagtatactgcatcatcagtccagaaagcacatgatatttttttatcagtatcaatgcagctagttttattttacaatatcgatatagctagtttaaatatattgcagctagatttataaatatttgtgttattatttatcatttgtgtaatcctgtttttagtattttagtttatatatgatgataatgtattccaaatttaaaagaagggaaataaatttaaacaagaaaaaaagtcatcaaacaaaaaacaaatgaaagggtggaaagatgttaccatgtaatgtgaatgttacagtatttcttttattatagagttaacaaattaactaatatgattttgttaataatgataaaatattttttttattattatttcataatataaaaatagtttacttaatataaaaaaaattctatcgttcacaacaaagttggccacctaatttaaccatgcatgtacccatggaccatattaggtaaccatcaaacctgatgaagagataaagagatgaagacttaagtcataacacaaaaccataaaaaacaaaaatacaatcaaccgtcaatctgaccaatgcatgaaaaagctgcaatagtgagtggcgacacaaagcacatgattttcttacaacggagataaaaccaaaaaaatatttcatgaacaacctagaacaaataaagcttttatataataaatatataaataaataaaggctatggaataatatacttcaatatatttggattaaataaattgttggcggggttgatatatttatacacacctaaagtcacttcaatctcattttcacttaacttttattttttttttctttttatttatcataaagagaatattgataatatactttttaacatatttttatgacattttttattggtgaaaacttattaaaaatcataaattttgtaagttagatttatttaaagagttcctcttcttattttaaattttttaataaatttttaaataactaaaatttgtgttaaaaatgttaaaaaagtgtgttattaacccttctcttcgaggatccgtacgatcccacatgcaagtttttatttcaatcccttttcctttgaataactgaccaagaacaacaagaaaaaaaaaaaaaaagaaaaggatcattttgaaaggatatttttcgctcctattcaaatactgtatttttaccaaaaaaactgtatttttcctacactctcaagctttgtttttcgcttcgactctcatgatttccttcatatgccaatcactctatttataaatggcataaggtagtgtgaacaattgcaaagcttgtcatcaaaagcttgcaatgtacaaattaatgtttttcatgcctttcaaaattatctgcaccccctagctattaatctaacatctaagtaaggctagtgaattttttcgaatagtcatgcagtgcattaatttccccgtgactattttggctttgactccaacactggccccgtacatccgtccctcattacatgaaaagaaatattgtttatattcttaattaaaaatattgtcccttctaaattttcatatagttaattattatattacttttttctctattctattagttctattttcaaattattatttatgcatatgtaaagtacattatatttttgctatatacttaaatatttctaaattattaaaaaaagactgatatgaaaaatttattctttttaaagctatatcattttatatatactttttcttttcttttctttcattttctattcaatttaataagaaataaattttgtaaatttttatttatcaatttataaaaatattttactttatatgttttttcacatttttgttaaacaaatcatatcattatgattgaaagagaggaaattgacagtgagtaataagtgatgagaaaaaaatgtgttatttcctaaaaaaaacctaaacaaacatgtatctactctctatttcatctatctctcatttcatttttctctttatctctttctttatttttttatcatatcatttcacattaattatttttactctctttattttttctctctatccctctcttatttccactcatatatacactccaaaattggggcatgcctttatcactactctatctcctccactaaatcatttaaatgaaactgaaaagcattggcaagtctcctcccctcctcaagtgatttccaactcagcattggcatctaattgattcagtatatctattgcatgtgtaaaagtctttccacaatacataactattaattaatcttaaataaataaaggataaaatatttttttttcttcataaaattaaaatatgttattttttgtttagatgtatattcgaataaatctaaatatatgataatgattttttatattgattaaacatataatcaatattaaatatgatatttttttatataggttgtacacataattttataaggataaaaaatatgataaaaataaattttaaatatttttatatttacgagaaaaaaaaatattttagccataaataaatgaccagcatattttacaaccttagtaattcataaattcctatatgtatatttgaaattaaaaacagataatcgttaagggaaggaatcctacgtcatctcttgccatttgtttttcatgcaaacagaaagggacgaaaaaccacctcaccatgaatcactcttcacaccatttttactagcaaacaagtctcaacaactgaagccagctctctttccgtttctttttacaacactttctttgaaatagtagtatttttttttcacatgatttattaacgtgccaaaagatgcttattgaatagagtgcacatttgtaatgtactactaattagaacatgaaaaagcattgttctaacacgataatcctgtgaaggcgttaactccaaagatccaatttcactatataaattgtgacgaaagcaaaatgaattcacatagctgagagagaaaggaaaggttaactaagaagcaatacttcagcggccgcatggagagatctcaacggcagtctcctccgccaccgtcgccgtcctcctcctcgtcctccgtctccgcggacaccgtcctcgtccctcccggaaagaggcggagggcggcgacggccaaggccggcgccgagcctaataagaggatccgcaaggaccccgccgccgccgccgcggggaagaggagctccgtctacaggggagtcaccaggcacaggtggacgggcaggttcgaggcgcatctctgggacaagcactgcctcgccgcgctccacaacaagaagaaaggcaggcaagtctacctgggggcgtatgacagcgaggaggcagctgctcgtgcctatgacctcgcagctctcaagtactggggtcctgagactctgctcaacttccctgtggaggattactccagcgagatgccggagatggaggccgtgtcccgggaggagtacctggcctccctccgccgcaggagcagcggcttctccaggggcgtctccaagtacagaggcgtcgccaggcatcaccacaacgggaggtgggaggcacggattgggcgagtctttgggaacaagtacctctacttgggaacatttgacactcaagaagaggcagccaaggcctatgaccttgcggccattgaataccgtggcgtcaatgctgtaaccaacttcgacatcagctgctacctggaccacccgctgttcctggcacagctccaacaggagccacaggtggtgccggcactcaaccaagaacctcaacctgatcagagcgaaaccggaactacagagcaagagccggagtcaagcgaagccaagacaccggatggcagtgcagaacccgatgagaacgcggtgcctgacgacaccgcggagcccctcaccacagtcgacgacagcatcgaagagggcttgtggagcccttgcatggattacgagctagacaccatgtcgagaccaaactttggcagctcaatcaatctgagcgagtggttcgctgacgcagacttcgactgcaacatcggatgcctgttcgatgggtgttctgcggctgacgaaggaagcaaggatggtgtaggtctggcagatttcagtctgtttgaggcaggtgatgtccagctgaaggatgttctttcggatatggaagaggggatacaacctccagcgatgatcagtgtgtgcaacgc

SEQ ID NO: 32 - DNA, 19713 bp, Artificial Sequence
  vector pKR1220
  misc_feature (15083)..(15083): n is a, c, g, or t
cgcgccagatcctctagagtcgacctgcaggcatgcaagcttggcgtaatcatggtcatagctgtttcctgtgtgaaattgttatccgctcacaattccacacaacatacgagccggaagcataaagtgtaaagcctggggtgcctaatgagtgagctaactcacattaattgcgttgcgctcactgcccgctttccagtcgggaaacctgtcgtgccagctgcattaatgaatcggccaacgcgcggggagaggcggtttgcgtattggatcgatccctgaaagcgacgttggatgttaacatctacaaattgccttttcttatcgaccatgtacgtaagcgcttacgtttttggtggacccttgaggaaactggtagctgttgtgggcctgtggtctcaagatggatcattaatttccaccttcacctacgatggggggcatcgcaccggtgagtaatattgtacggctaagagcgaatttggcctgtagacctcaattgcgagctttctaatttcaaactattcgggcctaacttttggtgtgatgatgctgactggcaggatatataccgttgtaatttgagctcgtgtgaataagtcgctgtgtatgtttgtttgattgtttctgttggagtgcagcccatttcaccggacaagtcggctagattgatttagccctgatgaactgccgaggggaagccatcttgagcgcggaatgggaatggatttcgttgtacaacgagacgacagaacacccacgggaccgagcttcgcgagcttttgtatccgtggcatccttggtccgggcgatttgttcacgtccatgaggcgctctccaaaggaacgcatattttccggtgcaacctttccggttcttcctctactcgacctcttgaagtcccagcatgaatgttcgaccgctccgcaagcggatctttggcgcaaccagccggtttcgcacgtcgattctcgcgagcctgcatactttggcaagattgctgaatgacgctgatgcttcatcgcaatctgcgataatggggtaagtatccggtgaaggccgcaggtcaggccgcctgagcactcagtgtcttggatgtccagttccacggcagctgttgctcaagcctgctgatcggagcgtccgcaaggtcggcgcggacgtcggcaagccaggcctgcggatcgatgttattgagcttggcgctcatgatcagtgtcgccatgaacgccgcacgttcagcacaacgatccgatccggcaaacagccatgacttcctgccgagtacatagcctctgagcgttcgttcggcagcattgttcgtcaggcaaatcgggccgtcatcgaggaatgacgtaatgccatcccatcgcttgagcatgtaatttatcgcctcggcgacgggagaactgcgcgacaatttcccccgctcggtttcgagccaatcatgcagctcttcggcgagtgaccttgatcaggccaccgccacgaccgcggaagacgaacagatgcctgcgcatcggatcgcgcttcagcgtctcttgcaccatcagcgacaaaccgggaaagcctttgcgcatgtccgtacttatgtcgccacttgggagggcttcgtctacgtggccttcgtgatcgacgtcttcgcccgtcgcattgtcggatggcgggcgagccggacagcacatgcaggctttgtcctcgatgccctcgaggaggctcatcatgatcggcgtcccgctcatggcggcctagtgcatcactcggatcgcggtgttcaatacgtgtcctttcgctattccgagcggttggcagaagcaggtatcgagccatctatcggaagcgtcggcgacagcacgacaacgccctcgcagaagcgatcaacggtctttacaaggccgaggtcattcatcggcgtggaccatggaggagcttcgaagcggtcgagttcgctaccttggaatggatagactggttcaaccacggcggcttttgaagcccatcggcaatataccgccagccgaagacgaggatcagtattacgccatgctggacgaagcagccatggctgcgcattttaacgaaatggcctccggcaaacccggtgcggttcacttgttgcgtgggaaagttcacgggactccgcgcacgagccttcttcgtaatagccatatcgaccgaattgacctgcaggggggggggggaaagccacgttgtgtctcaaaatctctgatgttacattgcacaagataaaaatatatcatcatgaacaataaaactgtctgcttacataaacagtaatacaaggggtgttatgagccatattcaacgggaaacgtcttgctcgaggccgcgattaaattccaacatggatgctgatttatatgggtataaatgggctcgcgataatgtcgggcaatcaggtgcgacaatctatcgattgtatgggaagcccgatgcgccagagttgtttctgaaacatggcaaaggtagcgttgccaatgatgttacagatgagatggtcagactaaactggctgacggaatttatgcctcttccgaccatcaagcattttatccgtactcctgatgatgcatggttactcaccactgcgatccccgggaaaacagcattccaggtattagaagaatatcctgattcaggtgaaaatattgttgatgcgctggcagtgttcctgcgccggttgcattcgattcctgtttgtaattgtccttttaacagcgatcgcgtatttcgtctcgctcaggcgcaatcacgaatgaataacggtttggttgatgcgagtgattttgatgacgagcgtaatggctggcctgttgaacaagtctggaaagaaatgcataagcttttgccattctcaccggattcagtcgtcactcatggtgatttctcacttgataaccttatttttgacgaggggaaattaataggttgtattgatgttggacgagtcggaatcgcagaccgataccaggatcttgccatcctatggaactgcctcggtgagttttctccttcattacagaaacggctttttcaaaaatatggtattgataatcctgatatgaataaattgcagtttcatttgatgctcgatgagtttttctaatcagaattggttaattggttgtaacactggcagagcattacgctgacttgacgggacggcggctttgttgaataaatcgaacttttgctgagttgaaggatcagatcacgcatcttcccgacaacgcagaccgttccgtggcaaagcaaaagttcaaaatcaccaactggtccacctacaacaaagctctcatcaaccgtggctccctcactttctggctggatgatggggcgattcaggcctggtatgagtcagcaacaccttcttcacgaggcagacctcagcgcccccccccccctgcaggtcttttccaatgatgagcacttttaaagttctgctatgtggcgcggtattatcccgtgttgacgccgggcaagagcaactcggtcgccgcatacactattctcagaatgacttggttgagtactcaccagtcacagaaaagcatcttacggatggcatgacagtaagagaattatgcagtgctgccataaccatgagtgataacactgcggccaacttacttctgacaacgatcggaggaccgaaggagctaaccgcttttttgcacaacatgggggatcatgtaactcgccttgatcgttgggaaccggagctgaatgaagccataccaaacgacgagcgtgacaccacgatgcctgtagcaatggcaacaacgttgcgcaaactattaactggcgaactacttactctagcttcccggcaacaattaatagactggatggaggcggataaagttgcaggaccacttctgcgctcggcccttccggctggctggtttattgctgataaatctggagccggtgagcgtgggtctcgcggtatcattgcagcactggggccagatggtaagccctcccgtatcgtagttatctacacgacggggagtcaggcaactatggatgaacgaaatagacagatcgctgagataggtgcctcactgattaagcattggtaactgtcagaccaagtttactcatatatactttagattgatttaaaacttcatttttaatttaaaaggatctaggtgaagatcctttttgataatctcatgaccaaaatcccttaacgtgagttttcgttccactgagcgtcagaccccgtagaaaagatcaaaggatcttcttgagatcctttttttctgcgcgtaatctgctgcttgcaaacaaaaaaaccaccgctaccagcggtggtttgtttgccggatcaagagctaccaactctttttccgaaggtaactggcttcagcagagcgcagataccaaatactgtccttctagtgtagccgtagttaggccaccacttcaagaactctgtagcaccgcctacatacctcgctctgctaatcctgttaccagtggctgctgccagtggcgataagtcgtgtcttaccgggttggactcaagacgatagttaccggataaggcgcagcggtcgggctgaacggggggttcgtgcacacagcccagcttggagcgaacgacctacaccgaactgagatacctacagcgtgagctatgagaaagcgccacgcttcccgaagggagaaaggcggacaggtatccggtaagcggcagggtcggaacaggagagcgcacgagggagcttccagggggaaacgcctggtatctttatagtcctgtcgggtttcgccacctctgacttgagcgtcgatttttgtgatgctcgtcaggggggcggagcctatggaaaaacgccagcaacgcggcctttttacggttcctggccttttgctggccttttgctcacatgttctttcctgcgttatcccctgattctgtggataaccgtattaccgcctttgagtgagctgataccgctcgccgcagccgaacgaccgagcgcagcgagtcagtgagcgaggaagcggaagagcgcctgatgcggtattttctccttacgcatctgtgcggtatttcacaccgcatatggtgcactctcagtacaatctgctctgatgccgcatagttaagccagtatacactccgctatcgctacgtgactgggtcatggctgcgccccgacacccgccaacacccgctgacgcgccctgacgggcttgtctgctcccggcatccgcttacagacaagctgtgaccgtctccgggagctgcatgtgtcagaggttttcaccgtcatcaccgaaacgcgcgaggcagggtgccttgatgtgggcgccggcggtcgagtggcgacggcgcggcttgtccgcgccctggtagattgcctggccgtaggccagccatttttgagcggccagcggccgcgataggccgacgcgaagcggcggggcgtagggagcgcagcgaccgaagggtaggcgctttttgcagctcttcggctgtgcgctggccagacagttatgcacaggccaggcgggttttaagagttttaataagttttaaagagttttaggcggaaaaatcgccttttttctcttttatatcagtcacttacatgtgtgaccggttcccaatgtacggctttgggttcccaatgtacgggttccggttcccaatgtacggctttgggttcccaatgtacgtgctatccacaggaaagagaccttttcgacctttttcccctgctagggcaatttgccctagcatctgctccgtacattaggaaccggcggatgcttcgccctcgatcaggttgcggtagcgcatgactaggatcgggccagcctgccccgcctcctccttcaaatcgtactccggcaggtcatttgacccgatcagcttgcgcacggtgaaacagaacttcttgaactctccggcgctgccactgcgttcgtagatcgtcttgaacaaccatctggcttctgccttgcctgcggcgcggcgtgccaggcggtagagaaaacggccgatgccgggatcgatcaaaaagtaatcggggtgaaccgtcagcacgtccgggttcttgccttctgtgatctcgcggtacatccaatcagctagctcgatctcgatgtactccggccgcccggtttcgctctttacgatcttgtagcggctaatcaaggcttcaccctcggataccgtcaccaggcggccgttcttggccttcttcgtacgctgcatggcaacgtgcgtggtgtttaaccgaatgcaggtttctaccaggtcgtctttctgctttccgccatcggctcgccggcagaacttgagtacgtccgcaacgtgtggacggaacacgcggccgggcttgtctcccttcccttcccggtatcggttcatggattcggttagatgggaaaccgccatcagtaccaggtcgtaatcccacacactggccatgccggccggccctgcggaaacctctacgtgcccgtctggaagctcgtagcggatcacctcgccagctcgtcggtcacgcttcgacagacggaaaacggccacgtccatgatgctgcgactatcgcgggtgcccacgtcatagagcatcggaacgaaaaaatctggttgctcgtcgcccttgggcggcttcctaatcgacggcgcaccggctgccggcggttgccgggattctttgcggattcgatcagcggccgcttgccacgattcaccggggcgtgcttctgcctcgatgcgttgccgctgggcggcctgcgcggccttcaacttctccaccaggtcatcacccagcgccgcgccgatttgtaccgggccggatggtttgcgaccgctcacgccgattcctcgggcttgggggttccagtgccattgcagggccggcagacaacccagccgcttacgcctggccaaccgcccgttcctccacacatggggcattccacggcgtcggtgcctggttgttcttgattttccatgccgcctcctttagccgctaaaattcatctactcatttattcatttgctcatttactctggtagctgcgcgatgtattcagatagcagctcggtaatggtcttgccttggcgtaccgcgtacatcttcagcttggtgtgatcctccgccggcaactgaaagttgacccgcttcatggctggcgtgtctgccaggctggccaacgttgcagccttgctgctgcgtgcgctcggacggccggcacttagcgtgtttgtgcttttgctcattttctctttacctcattaactcaaatgagttttgatttaatttcagcggccagcgcctggacctcgcgggcagcgtcgccctcgggttctgattcaagaacggttgtgccggcggcggcagtgcctgggtagctcacgcgctgcgtgatacgggactcaagaatgggcagctcgtacccggccagcgcctcggcaacctcaccgccgatgcgcgtgcctttgatcgcccgcgacacgacaaaggccgcttgtagccttccatccgtgacctcaatgcgctgcttaaccagctccaccaggtcggcggtggcccatatgtcgtaagggcttggctgcaccggaatcagcacgaagtcggctgccttgatcgcggacacagccaagtccgccgcctggggcgctccgtcgatcactacgaagtcgcgccggccgatggccttcacgtcgcggtcaatcgtcgggcggtcgatgccgacaacggttagcggttgatcttcccgcacggccgcccaatcgcgggcactgccctggggatcggaatcgactaacagaacatcggccccggcgagttgcagggcgcgggctagatgggttgcgatggtcgtcttgcctgacccgcctttctggttaagtacagcgataacttcatgcgttcccttgcgtatttgtttatttactcatcgcatcatatacgcagcgaccgcatgacgcaagctgttttactcaaatacacatcacctttttagacggcggcgctcggtttcttcagcggccaagctggccggccaggccgccagcttggcatcagacaaaccggccaggatttcatgcagccgcacggttgagacgtgcgcgggcggctcgaacacgtacccggccgcgatcatctccgcctcgatctcttcggtaatgaaaaacggttcgtcctggccgtcctggtgcggtttcatgcttgttcctcttggcgttcattctcggcggccgccagggcgtcggcctcggtcaatgcgtcctcacggaaggcaccgcgccgcctggcctcggtgggcgtcacttcctcgctgcgctcaagtgcgcggtacagggtcgagcgatgcacgccaagcagtgcagccgcctctttcacggtgcggccttcctggtcgatcagctcgcgggcgtgcgcgatctgtgccggggtgagggtagggcgggggccaaacttcacgcctcgggccttggcggcctcgcgcccgctccgggtgcggtcgatgattagggaacgctcgaactcggcaatgccggcgaacacggtcaacaccatgcggccggccggcgtggtggtgtcggcccacggctctgccaggctacgcaggcccgcgccggcctcctggatgcgctcggcaatgtccagtaggtcgcgggtgctgcgggccaggcggtctagcctggtcactgtcacaacgtcgccagggcgtaggtggtcaagcatcctggccagctccgggcggtcgcgcctggtgccggtgatcttctcggaaaacagcttggtgcagccggccgcgtgcagttcggcccgttggttggtcaagtcctggtcgtcggtgctgacgcgggcatagcccagcaggccagcggcggcgctcttgttcatggcgtaatgtctccggttctagtcgcaagtattctactttatgcgactaaaacacgcgacaagaaaacgccaggaaaagggcagggcggcagcctgtcgcgtaacttaggacttgtgcgacatgtcgttttcagaagacggctgcactgaacgtcagaagccgactgcactatagcagcggaggggttggaccacaggacgggtgtggtcgccatgatcgcgtagtcgatagtggctccaagtagcgaagcgagcaggactgggcggcggccaaagcggtcggacagtgctccgagaacgggtgcgcatagaaattgcatcaacgcatatagcgctagcagcacgccatagtgactggcgatgctgtcggaatggacgatatcccgcaagaggcccggcagtaccggcataaccaagcctatgcctacagcatccagggtgacggtgccgaggatgacgatgagcgcattgttagatttcatacacggtgcctgactgcgttagcaatttaactgtgataaactaccgcattaaagctagcttgcttggtcgttccgcgtgaacgtcggctcgattgtacctgcgttcaaatactttgcgatcgtgttgcgcgcctgcccggtgcgtcggctgatctcacggatcgactgcttctctcgcaacgccatccgacggatgatgtttaaaagtcccatgtggatcactccgttgccccgtcgctcaccgtgttggggggaaggtgcacatggctcagttctcaatggaaattatctgcctaaccggctcagttctgcgtagaaaccaacatgcaagctccaccgggtgcaaagcggcagcggcggcaggatatattcaattgtaaatggcttcatgtccgggaaatctacatggatcagcaatgagtatgatggtcaatatggagaaaaagaaagagtaattaccaattttttttcaattcaaaaatgtagatgtccgcagcgttattataaaatgaaagtacattttgataaaacgacaaattacgatccgtcgtatttataggcgaaagcaataaacaaattattctaattcggaaatctttatttcgacgtgtctacattcacgtccaaatgggggcttagatgagaaacttcacgatcgatgccttgatttcgccattcccagatacccatttcatcttcagattggtctgagattatgcgaaaatatacactcatatacataaatactgacagtttgagctaccaattcagtgtagcccattacctcacataattcactcaaatgctaggcagtctgtcaactcggcgtcaatttgtcggccactatacgatagttgcgcaaattttcaaagtcctggcctaacatcacacctctgtcggcggcgggtcccatttgtgataaatccaccatatcgaattaattcagactcctttgccccagagatcacaatggacgacttcctctatctctacgatctagtcaggaagttcgacggagaaggtgacgataccatgttcaccactgataatgagaagattagccttttcaatttcagaaagaatgctaacccacagatggttagagaggcttacgcagcaggtctcatcaagacgatctacccgagcaataatctccaggagatcaaataccttcccaagaaggttaaagatgcagtcaaaagattcaggactaactgcatcaagaacacagagaaagatatatttctcaagatcagaagtactattccagtatggacgattcaaggcttgcttcacaaaccaaggcaagtaatagagattggagtctctaaaaaggtagttcccactgaatcaaaggccatggagtcaaagattcaaatagaggacctaacagaactcgccgtaaagactggcgaacagttcatacagagtctcttacgactcaatgacaagaagaaaatcttcgtcaacatggtggagcacgacacgcttgtctactccaaaaatatcaaagatacagtctcagaagaccaaagggcaattgagacttttcaacaaagggtaatatccggaaacctcctcggattccattgcccagctatctgtcactttattgtgaagatagtggaaaaggaaggtggctcctacaaatgccatcattgcgataaaggaaaggccatcgttgaagatgcctctgccgacagtggtcccaaagatggacccccacccacgaggagcatcgtggaaaaagaagacgttccaaccacgtcttcaaagcaagtggattgatgtgatatctccactgacgtaagggatgacgcacaatcccactatccttcgcaagacccttcctctatataaggaagttcatttcatttggagaggacacgctgaaatcaccagtctccaagcttgcggggatcgtttcgcatgattgaacaagatggattgcacgcaggttctccggccgcttgggtggagaggctattcggctatgactgggcacaacagacaatcggctgctctgatgccgccgtgttccggctgtcagcgcaggggcgcccggttctttttgtcaagaccgacctgtccggtgccctgaatgaactgcaggacgaggcagcgcggctatcgtggctggccacgacgggcgttccttgcgcagctgtgctcgacgttgtcactgaagcgggaagggactggctgctattgggcgaagtgccggggcaggatctcctgtcatctcaccttgctcctgccgagaaagtatccatcatggctgatgcaatgcggcggctgcatacgcttgatccggctacctgcccattcgaccaccaagcgaaacatcgcatcgagcgagcacgtactcggatggaagccggtcttgtcgatcaggatgatctggacgaagagcatcaggggctcgcgccagccgaactgttcgccaggctcaaggcgcgcatgcccgacggcgaggatctcgtcgtgacccatggcgatgcctgcttgccgaatatcatggtggaaaatggccgcttttctggattcatcgactgtggccggctgggtgtggcggaccgctatcaggacatagcgttggctacccgtgatattgctgaagagcttggcggcgaatgggctgaccgcttcctcgtgctttacggtatcgccgctcccgattcgcagcgcatcgccttctatcgccttcttgacgagttcttctgagcgggactctggggttcgaaatgaccgaccaagcgacgcccaacctgccatcacgagatttcgattccaccgccgccttctatgaaaggttgggcttcggaatcgttttccgggacgccggctggatgatcctccagcgcggggatctcatgctggagttcttcgcccaccccggatcgatccaacacttacgtttgcaacgtccaagagcaaatagaccacgaacgccggaaggttgccgcagcgtgtggattgcgtctcaattctctcttgcaggaatgcaatgatgaatatgatactgactatgaaactttgagggaatactgcctagcaccgtcacctcataacgtgcatcatgcatgccctgacaacatggaacatcgctatttttctgaagaattatgctcgttggaggatgtcgcggcaattgcagctattgccaacatcgaactacccctcacgcatgcattcatcaatattattcatgcggggaaaggcaagattaatccaactggcaaatcatccagcgtgattggtaacttcagttccagcgacttgattcgttttggtgctacccacgttttcaataaggacgagatggtggagtaaagaaggagtgcgtcgaagcagatcgttcaaacatttggcaataaagtttcttaagattgaatcctgttgccggtcttgcgatgattatcatataatttctgttgaattacgttaagcatgtaataattaacatgtaatgcatgacgttatttatgagatgggtttttatgattagagtcccgcaattatacatttaatacgcgatagaaaacaaaatatagcgcgcaaactaggataaattatcgcgcgcggtgtcatctatgttactagatcgatcaaacttcggtactgtgtaatgacgatgagcaatcgagaggctgactaacaaaaggtacatcgcgatggatcgatccattcgccattcaggctgcgcaactgttgggaagggcgatcggtgcgggcctcttcgctattacgccagctggcgaaagggggatgtgctgcaaggcgattaagttgggtaacgccagggttttcccagtcacgacgttgtaaaacgacggccagtgaattcctgcagcccgggggatccgcccactcgaggcgcgccgtcgacggatataatgagccgtaaacaaagatgattaagtagtaattaatacgtactagtaaaagtggcaaaagataacgagaaagaaccaatttctttgcattcggccttagcggaaggcatatataagctttgattattttatttagtgtaatgatttcgtacaaccaaagcatttatttagtactctcacacttgtgtcgcggccggccgctacaggaacaggtggtggcggccctcggcgcgctcgtactgctccacgatggtgtagtcctcgttgtgggaggtgatgtccagcttggagtccacgtagtagtagccgggcagctgcacgggcttcttggccatgtagatggacttgaactccaccaggtagtggccgccgtccttcagcttcagggccttgtggatctcgcccttcagcacgccgtcgcgggggtacaggcgctcggtggaggcctcccagcccatagtcttcttctgcattacggggccgtcggaggggaagttcacgccgatgaacttcaccttgtagatgaaggagccgtcctgcagggaggagtcctgggtcacggtcaccacgccgccgtcctcgaagttcatcacgcgctcccacttgaagccctcggggaaggacagcttcttgtagtcggggatgtcggcggggtgcttcacgtacaccttggagccgtactggaactggggggacaggatgtcccaggcgaagggcagggggccgcccttggtcaccttcagcttggcggtctgggtgccctcgtaggggcggccctcgccctcgccctcgatctcgaactcgtggccgttcacggagccctccatgcgcaccttgaagcgcatgaactccttgatgacgtcctcggaggaggccatgggccgcttggggggctatggaagactttcttagttagttgtgtgaataagcaatgttgggagaatcgggactacttataggataggaataaaacagaaaagtattaagtgctaatgaaatatttagactgataattaaaatcttcacgtatgtccacttgatataaaaacgtcaggaataaaggaagtacagtagaatttaaaggtactctttttatatatacccgtgttctctttttggctagctagttgcataaaaaataatctatatttttatcattattttaaatatcttatgagatggtaaatatttatcataattttttttactattatttattatttgtgtgtgtaatacatatagaagttaattacaaattttatttactttttcattattttgatatgattcaccattaatttagtgttattatttataatagttcattttaatctttttgtatatattatgcgtgcagtacttttttcctacatataactactattacattttatttatataatatttttattaatgaattttcgtgataatatgtaatattgttcattattatttcagattttttaaaaatatttgtgttattatttatgaaatatgtaatttttttagtatttgattttatgatgataaagtgttctaaattcaaaagaagggggaaagcgtaaacattaaaaaacgtcatcaaacaaaaacaaaatcttgttaataaagataaaactgtttgttttgatcactgttatttcgtaatataaaaacattatttatatttatattgttgacaaccaaatttgcctatcaaatctaaccaatataatgcatgcgtggcaggtaatgtactaccatgaacttaagtcatgacataataaaccgtgaatctgaccaatgcatgtacctanctaaattgtatttgtgacacgaagcaaatgattcaattcacaatggagatgggaaacaaataatgaagaacccagaactaagaaagcttttctgaaaaataaaataaaggcaatgtcaaaagtatactgcatcatcagtccagaaagcacatgatatttttttatcagtatcaatgcagctagttttattttacaatatcgatatagctagtttaaatatattgcagctagatttataaatatttgtgttattatttatcatttgtgtaatcctgtttttagtattttagtttatatatgatgataatgtattccaaatttaaaagaagggaaataaatttaaacaagaaaaaaagtcatcaaacaaaaaacaaatgaaagggtggaaagatgttaccatgtaatgtgaatgttacagtatttcttttattatagagttaacaaattaactaatatgattttgttaataatgataaaatattttttttattattatttcataatataaaaatagtttacttaatataaaaaaaattctatcgttcacaacaaagttggccacctaatttaaccatgcatgtacccatggaccatattaggtaaccatcaaacctgatgaagagataaagagatgaagacttaagtcataacacaaaaccataaaaaacaaaaatacaatcaaccgtcaatctgaccaatgcatgaaaaagctgcaatagtgagtggcgacacaaagcacatgattttcttacaacggagataaaaccaaaaaaatatttcatgaacaacctagaacaaataaagcttttatataataaatatataaataaataaaggctatggaataatatacttcaatatatttggattaaataaattgttggcggggttgatatatttatacacacctaaagtcacttcaatctcattttcacttaacttttattttttttttctttttatttatcataaagagaatattgataatatactttttaacatatttttatgacattttttattggtgaaaacttattaaaaatcataaattttgtaagttagatttatttaaagagttcctcttcttattttaaattttttaataaatttttaaataactaaaatttgtgttaaaaatgttaaaaaagtgtgttattaacccttctcttcgaggatccgtacgatcccacatgcaagtttttatttcaatcccttttcctttgaataactgaccaagaacaacaagaaaaaaaaaaaaaaagaaaaggatcattttgaaaggatatttttcgctcctattcaaatactgtatttttaccaaaaaaactgtatttttcctacactctcaagctttgtttttcgcttcgactctcatgatttccttcatatgccaatcactctatttataaatggcataaggtagtgtgaacaattgcaaagcttgtcatcaaaagcttgcaatgtacaaattaatgtttttcatgcctttcaaaattatctgcaccccctagctattaatctaacatctaagtaaggctagtgaattttttcgaatagtcatgcagtgcattaatttccccgtgactattttggctttgactccaacactggccccgtacatccgtccctcattacatgaaaagaaatattgtttatattcttaattaaaaatattgtcccttctaaattttcatatagttaattattatattacttttttctctattctattagttctattttcaaattattatttatgcatatgtaaagtacattatatttttgctatatacttaaatatttctaaattattaaaaaaagactgatatgaaaaatttattctttttaaagctatatcattttatatatactttttcttttcttttctttcattttctattcaatttaataagaaataaattttgtaaatttttatttatcaatttataaaaatattttactttatatgttttttcacatttttgttaaacaaatcatatcattatgattgaaagagaggaaattgacagtgagtaataagtgatgagaaaaaaatgtgttatttcctaaaaaaaacctaaacaaacatgtatctactctctatttcatctatctctcatttcatttttctctttatctctttctttatttttttatcatatcatttcacattaattatttttactctctttattttttctctctatccctctcttatttccactcatatatacactccaaaattggggcatgcctttatcactactctatctcctccactaaatcatttaaatgaaactgaaaagcattggcaagtctcctcccctcctcaagtgatttccaactcagcattggcatctaattgattcagtatatctattgcatgtgtaaaagtctttccacaatacataactattaattaatcttaaataaataaaggataaaatatttttttttcttcataaaattaaaatatgttattttttgtttagatgtatattcgaataaatctaaatatatgataatgattttttatattgattaaacatataatcaatattaaatatgatatttttttatataggttgtacacataattttataaggataaaaaatatgataaaaataaattttaaatatttttatatttacgagaaaaaaaaatattttagccataaataaatgaccagcatattttacaaccttagtaattcataaattcctatatgtatatttgaaattaaaaacagataatcgttaagggaaggaatcctacgtcatctcttgccatttgtttttcatgcaaacagaaagggacgaaaaaccacctcaccatgaatcactcttcacaccatttttactagcaaacaagtctcaacaactgaagccagctctctttccgtttctttttacaacactttctttgaaatagtagtatttttttttcacatgatttattaacgtgccaaaagatgcttattgaatagagtgcacatttgtaatgtactactaattagaacatgaaaaagcattgttctaacacgataatcctgtgaaggcgttaactccaaagatccaatttcactatataaattgtgacgaaagcaaaatgaattcacatagctgagagagaaaggaaaggttaactaagaagcaatacttcagcggccgcatggagagatctcaacggcagtctcctccgccaccgtcgccgtcctcctcctcgtcctccgtctccgcggacaccgtcctcgtccctcccggaaagaggcggagggcggcgacggccaaggccggcgccgagcctaataagaggatccgcaaggaccccgccgccgccgccgcggggaagaggagctccgtctacaggggagtcaccaggcacaggtggacgggcaggttcgaggcgcatctctgggacaagcactgcctcgccgcgctccacaacaagaagaaaggcaggcaagtctacctgggggcgtatgacagcgaggaggcagctgctcgtgcctatgacctcgcagctctcaagtactggggtcctgagactctgctcaacttccctgtggaggattactccagcgagatgccggagatggaggccgtgtcccgggaggagtacctggcctccctccgccgcaggagcagcggcttctccaggggcgtctccaagtacagaggcgtcgccaggcatcaccacaacgggaggtgggaggcacggattgggcgagtctttgggaacaagtacctctacttgggaacatttgacactcaagaagaggcagccaaggcctatgaccttgcggccattgaataccgtggcgtcaatgctgtaaccaacttcgacatcagctgctacctggaccacccgctgttcctggcacagctccaacaggagccacaggtggtgccggcactcaaccaagaacctcaacctgatcagagcgaaaccggaactacagagcaagagccggagtcaagcgaagccaagacaccggatggcagtgcagaacccgatgagaacgcggtgcctgacgacaccgcggagcccctcaccacagtcgacgacagcatcgaagagggcttgtggagcccttgcatggattacgagctagacaccatgtcgagaccaaactttggcagctcaatcaatctgagcgagtggttcgctgacgcagacttcgactgcaacatcggatgcctgttcgatgggtgttctgcggctgacgaaggaagcaaggatggtgtaggtctggcagatttcagtctgtttgaggcaggtgatgtccagctgaaggatgttctttcggatatggaagaggggatacaacctccagcgatgatcagtgtgtgcaacgcggccgcatgagccgtaaaggttcaatacaacgagtgcttgttttcttagggacaagcattgtacttatgtatgattctgtgtaaccatgagtcttccacgttgtactaatgtgaagggcaaaaataaaacacagaacaagttcgtttttctcaaataatgtgaaggtagaaaatggaaccatgcctcctctcttgcatgtgatttaaaatattagcagatggtaccgtacgagatccggccggccagatcctgcaggagatccaagcttgg

SEQ ID NO: 33 - DNA, 10287 bp, Artificial Sequence
  vector pKR1144
  misc_feature (7136)..(7136): n is a, c, g, or t
gtacgagatccggccggccagatcctgcaggagatccaagcttggcgcgccgttctatagtgtcacctaaatcgtatgtgtatgatacataaggttatgtattaattgtagccgcgttctaacgacaatatgtccatatggtgcactctcagtacaatctgctctgatgccgcatagttaagccagccccgacacccgccaacacccgctgacgcgccctgacgggcttgtctgctcccggcatccgcttacagacaagctgtgaccgtctccgggagctgcatgtgtcagaggttttcaccgtcatcaccgaaacgcgcgagacgaaagggcctcgtgatacgcctatttttataggttaatgtcatgaccaaaatcccttaacgtgagttttcgttccactgagcgtcagaccccgtagaaaagatcaaaggatcttcttgagatcctttttttctgcgcgtaatctgctgcttgcaaacaaaaaaaccaccgctaccagcggtggtttgtttgccggatcaagagctaccaactctttttccgaaggtaactggcttcagcagagcgcagataccaaatactgtccttctagtgtagccgtagttaggccaccacttcaagaactctgtagcaccgcctacatacctcgctctgctaatcctgttaccagtggctgctgccagtggcgataagtcgtgtcttaccgggttggactcaagacgatagttaccggataaggcgcagcggtcgggctgaacggggggttcgtgcacacagcccagcttggagcgaacgacctacaccgaactgagatacctacagcgtgagcattgagaaagcgccacgcttcccgaagggagaaaggcggacaggtatccggtaagcggcagggtcggaacaggagagcgcacgagggagcttccagggggaaacgcctggtatctttatagtcctgtcgggtttcgccacctctgacttgagcgtcgatttttgtgatgctcgtcaggggggcggagcctatggaaaaacgccagcaacgcggcctttttacggttcctggccttttgctggccttttgctcacatgttctttcctgcgttatcccctgattctgtggataaccgtattaccgcctttgagtgagctgataccgctcgccgcagccgaacgaccgagcgcagcgagtcagtgagcgaggaagcggaagagcgcccaatacgcaaaccgcctctccccgcgcgttggccgattcattaatgcaggttgatcgattcgacatcgatctagtaacatagatgacaccgcgcgcgataatttatcctagtttgcgcgctatattttgttttctatcgcgtattaaatgtataattgcgggactctaatcataaaaacccatctcataaataacgtcatgcattacatgttaattattacatgcttaacgtaattcaacagaaattatatgataatcatcgcaagaccggcaacaggattcaatcttaagaaactttattgccaaatgtttgaacgatctgcttcgacgcactccttctttaggtacctcactattcctttgccctcggacgagtgctggggcgtcggtttccactatcggcgagtacttctacacagccatcggtccagacggccgcgcttctgcgggcgatttgtgtacgcccgacagtcccggctccggatcggacgattgcgtcgcatcgaccctgcgcccaagctgcatcatcgaaattgccgtcaaccaagctctgatagagttggtcaagaccaatgcggagcatatacgcccggagccgcggcgatcctgcaagctccggatgcctccgctcgaagtagcgcgtctgctgctccatacaagccaaccacggcctccagaagaagatgttggcgacctcgtattgggaatccccgaacatcgcctcgctccagtcaatgaccgctgttatgcggccattgtccgtcaggacattgttggagccgaaatccgcgtgcacgaggtgccggacttcggggcagtcctcggcccaaagcatcagctcatcgagagcctgcgcgacggacgcactgacggtgtcgtccatcacagtttgccagtgatacacatggggatcagcaatcgcgcatatgaaatcacgccatgtagtgtattgaccgattccttgcggtccgaatgggccgaacccgctcgtctggctaagatcggccgcagcgatcgcatccatggcctccgcgaccggctgcagaacagcgggcagttcggtttcaggcaggtcttgcaacgtgacaccctgtgcacggcgggagatgcaataggtcaggctctcgctgaattccccaatgtcaagcacttccggaatcgggagcgcggccgatgcaaagtgccgataaacataacgatctttgtagaaaccatcggcgcagctatttacccgcaggacatatccacgccctcctacatcgaagctgaaagcacgagattcttcgccctccgagagctgcatcaggtcggagacgctgtcgaacttttcgatcagaaacttctcgacagacgtcgcggtgagttcaggctttttcatggtttaataagaagagaaaagagttcttttgttatggctgaagtaatagagaaatgagctcgagcgtgtcctctccaaatgaaatgaacttccttatatagaggaagggtcttgcgaaggatagtgggattgtgcgtcatcccttacgtcagtggagatgtcacatcaatccacttgctttgaagacgtggttggaacgtcttctttttccacgatgctcctcgtgggtgggggtccatctttgggaccactgtcggcagaggcatcttgaatgatagcctttcctttatcgcaatgatggcatttgtaggagccaccttccttttctactgtcctttcgatgaagtgacagatagctgggcaatggaatccgaggaggtttcccgaaattatcctttgttgaaaagtctcaatagccctttggtcttctgagactgtatctttgacatttttggagtagaccagagtgtcgtgctccaccatgttgacgaagattttcttcttgtcattgagtcgtaaaagactctgtatgaactgttcgccagtcttcacggcgagttctgttagatcctcgatttgaatcttagactccatgcatggccttagattcagtaggaactacctttttagagactccaatctctattacttgccttggtttatgaagcaagccttgaatcgtccatactggaatagtacttctgatcttgagaaatatgtctttctctgtgttcttgatgcaattagtcctgaatcttttgactgcatctttaaccttcttgggaaggtatttgatctcctggagattgttactcgggtagatcgtcttgatgagacctgctgcgtaggcctctctaaccatctgtgggtcagcattctttctgaaattgaagaggctaaccttctcattatcagtggtgaacatagtgtcgtcaccttcaccttcgaacttccttcctagatcgtaaagatagaggaaatcgtccattgtaatctccggggcaaaggagatctcttttggggctggatcactgctgggccttttggttcctagcgtgagccagtgggctttttgctttggtgggcttgttagggccttagcaaagctcttgggcttgagttgagcttctcctttggggatgaagttcaacctgtctgtttgctgacttgttgtgtacgcgtcagctgctgctcttgcctctgtaatagtggcaaatttcttgtgtgcaactccgggaacgccgtttgttgccgcctttgtacaaccccagtcatcgtatataccggcatgtggaccgttatacacaacgtagtagttgatatgagggtgttgaatacccgattctgctctgagaggagcaactgtgctgttaagctcagatttttgtgggattggaattggatcgatctcgatcccgcgaaattaatacgactcactatagggagaccacaacggtttccctctagaaataattttgtttaactttaagaaggagatatacccatggaaaagcctgaactcaccgcgacgtctgtcgagaagtttctgatcgaaaagttcgacagcgtctccgacctgatgcagctctcggagggcgaagaatctcgtgctttcagcttcgatgtaggagggcgtggatatgtcctgcgggtaaatagctgcgccgatggtttctacaaagatcgttatgtttatcggcactttgcatcggccgcgctcccgattccggaagtgcttgacattggggaattcagcgagagcctgacctattgcatctcccgccgtgcacagggtgtcacgttgcaagacctgcctgaaaccgaactgcccgctgttctgcagccggtcgcggaggctatggatgcgatcgctgcggccgatcttagccagacgagcgggttcggcccattcggaccgcaaggaatcggtcaatacactacatggcgtgatttcatatgcgcgattgctgatccccatgtgtatcactggcaaactgtgatggacgacaccgtcagtgcgtccgtcgcgcaggctctcgatgagctgatgctttgggccgaggactgccccgaagtccggcacctcgtgcacgcggatttcggctccaacaatgtcctgacggacaatggccgcataacagcggtcattgactggagcgaggcgatgttcggggattcccaatacgaggtcgccaacatcttcttctggaggccgtggttggcttgtatggagcagcagacgcgctacttcgagcggaggcatccggagcttgcaggatcgccgcggctccgggcgtatatgctccgcattggtcttgaccaactctatcagagcttggttgacggcaatttcgatgatgcagcttgggcgcagggtcgatgcgacgcaatcgtccgatccggagccgggactgtcgggcgtacacaaatcgcccgcagaagcgcggccgtctggaccgatggctgtgtagaagtactcgccgatagtggaaaccgacgccccagcactcgtccgagggcaaaggaatagtgaggtacagcttggatcgatccggctgctaacaaagcccgaaaggaagctgagttggctgctgccaccgctgagcaataactagcataaccccttggggcctctaaacgggtcttgaggggttttttgctgaaaggaggaactatatccggatgatcgggcgcgccgtcgacggatccactagttctagagcggcccgcgccgtcgacggatataatgagccgtaaacaaagatgattaagtagtaattaatacgtactagtaaaagtggcaaaagataacgagaaagaaccaatttctttgcattcggccttagcggaaggcatatataagctttgattattttatttagtgtaatgatttcgtacaaccaaagcatttatttagtactctcacacttgtgtcgcggccggccgctacaggaacaggtggtggcggccctcggcgcgctcgtactgctccacgatggtgtagtcctcgttgtgggaggtgatgtccagcttggagtccacgtagtagtagccgggcagctgcacgggcttcttggccatgtagatggacttgaactccaccaggtagtggccgccgtccttcagcttcagggccttgtggatctcgcccttcagcacgccgtcgcgggggtacaggcgctcggtggaggcctcccagcccatagtcttcttctgcattacggggccgtcggaggggaagttcacgccgatgaacttcaccttgtagatgaaggagccgtcctgcagggaggagtcctgggtcacggtcaccacgccgccgtcctcgaagttcatcacgcgctcccacttgaagccctcggggaaggacagcttcttgtagtcggggatgtcggcggggtgcttcacgtacaccttggagccgtactggaactggggggacaggatgtcccaggcgaagggcagggggccgcccttggtcaccttcagcttggcggtctgggtgccctcgtaggggcggccctcgccctcgccctcgatctcgaactcgtggccgttcacggagccctccatgcgcaccttgaagcgcatgaactccttgatgacgtcctcggaggaggccatgggccgcttggggggctatggaagactttcttagttagttgtgtgaataagcaatgttgggagaatcgggactacttataggataggaataaaacagaaaagtattaagtgctaatgaaatatttagactgataattaaaatcttcacgtatgtccacttgatataaaaacgtcaggaataaaggaagtacagtagaatttaaaggtactctttttatatatacccgtgttctctttttggctagctagttgcataaaaaataatctatatttttatcattattttaaatatcttatgagatggtaaatatttatcataattttttttactattatttattatttgtgtgtgtaatacatatagaagttaattacaaattttatttactttttcattattttgatatgattcaccattaatttagtgttattatttataatagttcattttaatctttttgtatatattatgcgtgcagtacttttttcctacatataactactattacattttatttatataatatttttattaatgaattttcgtgataatatgtaatattgttcattattatttcagattttttaaaaatatttgtgttattatttatgaaatatgtaatttttttagtatttgattttatgatgataaagtgttctaaattcaaaagaagggggaaagcgtaaacattaaaaaacgtcatcaaacaaaaacaaaatcttgttaataaagataaaactgtttgttttgatcactgttatttcgtaatataaaaacattatttatatttatattgttgacaaccaaatttgcctatcaaatctaaccaatataatgcatgcgtggcaggtaatgtactaccatgaacttaagtcatgacataataaaccgtgaatctgaccaatgcatgtacctanctaaattgtatttgtgacacgaagcaaatgattcaattcacaatggagatgggaaacaaataatgaagaacccagaactaagaaagcttttctgaaaaataaaataaaggcaatgtcaaaagtatactgcatcatcagtccagaaagcacatgatatttttttatcagtatcaatgcagctagttttattttacaatatcgatatagctagtttaaatatattgcagctagatttataaatatttgtgttattatttatcatttgtgtaatcctgtttttagtattttagtttatatatgatgataatgtattccaaatttaaaagaagggaaataaatttaaacaagaaaaaaagtcatcaaacaaaaaacaaatgaaagggtggaaagatgttaccatgtaatgtgaatgttacagtatttcttttattatagagttaacaaattaactaatatgattttgttaataatgataaaatattttttttattattatttcataatataaaaatagtttacttaatataaaaaaaattctatcgttcacaacaaagttggccacctaatttaaccatgcatgtacccatggaccatattaggtaaccatcaaacctgatgaagagataaagagatgaagacttaagtcataacacaaaaccataaaaaacaaaaatacaatcaaccgtcaatctgaccaatgcatgaaaaagctgcaatagtgagtggcgacacaaagcacatgattttcttacaacggagataaaaccaaaaaaatatttcatgaacaacctagaacaaataaagcttttatataataaatatataaataaataaaggctatggaataatatacttcaatatatttggattaaataaattgttggcggggttgatatatttatacacacctaaagtcacttcaatctcattttcacttaacttttattttttttttctttttatttatcataaagagaatattgataatatactttttaacatatttttatgacattttttattggtgaaaacttattaaaaatcataaattttgtaagttagatttatttaaagagttcctcttcttattttaaattttttaataaatttttaaataactaaaatttgtgttaaaaatgttaaaaaagtgtgttattaacccttctcttcgaggatccgtaccgagctcggatcctctagaaatccgtcaacatggtggagcacgacactctcgtctactccaagaatatcaaagatacagtctcagaagaccaaagggctattgagacttttcaacaaagggtaatatcgggaaacctcctcggattccattgcccagctatctgtcacttcatcaaaaggacagtagaaaaggaaggtggcacctacaaatgccatcattgcgataaaggaaaggctatcgttcaagatgcctctgccgacagtggtcccaaagatggacccccacccacgaggagcatcgtggaaaaagaagacgttccaaccacgtcttcaaagcaagtggattgatgtgatgatcctatgcgtatggtatgacgtgtgttcaagatgatgacttcaaacctacctatgacgtatggtatgaacgtgtgtcgactgatgacttagatccactcgagcggctataaatacgtacctacgcaccctgcgctaccatccctagagctgcagcttatttttacaacaattaccaacaacaacaaacaacaaacaacattacaattactatttacaattacagtcgacccgggatcgtacctctagggtggcggccgcaagtatgaactaaaatgcatgtaggtgtaagagctcatggagagcatggaatattgtatccgaccatgtaacagtataataactgagctccatctcacttcttctatgaataaacaaaggatgttatgatatattaacactctatctatgcaccttattgttctatgataaatttcctcttattattataaatcatctgaatcgtgacggcttatggaatgcttcaaatagtacaaaaacaaatgtgtactataagactttctaaacaattctaaccttagcattgtgaacgagacataagtgttaagaagacataacaattataatggaagaagtttgtctccatttatatattatatattacccacttatgtattatattaggatgttaaggagacataacaattataaagagagaagtttgtatccatttatatattatatactacccatttatatattatacttatccacttatttaatgtctttataaggtttgatccatgatatttctaatattttagttgatatgtatatgaaagggtactatttgaactctcttactctgtataaaggttggatcatccttaaagtgggtctatttaattttattgcttcttacagataaaaaaaaaattatgagttggtttgataaaatattgaaggatttaaaataataataaataacatataatatatgtatataaatttattataatataacatttatctataaaaaagtaaatattgtcataaatctatacaatcgtttagccttgctggacgaatctcaattatttaaacgagagtaaacatatttgactttttggttatttaacaaattattatttaacactatatgaaatttttttttttatcagcaaagaataaaattaaattaagaaggacaatggtgtcccaatccttatacaaccaacttccacaagaaagtcaagtcagagacaacaaaaaaacaagcaaaggaaattttttaatttgagttgtcttgtttgctgcataatttatgcagtaaaacactacacataacccttttagcagtagagcaatggttgaccgtgtgcttagcttcttttattttatttttttatcagcaaagaataaataaaataaaatgagacacttcagggatgtttcaacaagctctagagggcccaattcgccctatagtgagtcgtattacaattcactggccgtcgttttacaacgtcgtgactgggaaaaccctggcgttacccaacttaatcgccttgcagcacatccccctttcgccagctggcgtaatagcgaagaggcccgcaccgatcgcccttcccaacagttgcgcagcctatac

SEQ ID NO: 34 - DNA, 11480 bp, Artificial Sequence
  vector pKR1149
  misc_feature (8496)..(8496): n is a, c, g, or t
ggccgcaagtatgaactaaaatgcatgtaggtgtaagagctcatggagagcatggaatattgtatccgaccatgtaacagtataataactgagctccatctcacttcttctatgaataaacaaaggatgttatgatatattaacactctatctatgcaccttattgttctatgataaatttcctcttattattataaatcatctgaatcgtgacggcttatggaatgcttcaaatagtacaaaaacaaatgtgtactataagactttctaaacaattctaaccttagcattgtgaacgagacataagtgttaagaagacataacaattataatggaagaagtttgtctccatttatatattatatattacccacttatgtattatattaggatgttaaggagacataacaattataaagagagaagtttgtatccatttatatattatatactacccatttatatattatacttatccacttatttaatgtctttataaggtttgatccatgatatttctaatattttagttgatatgtatatgaaagggtactatttgaactctcttactctgtataaaggttggatcatccttaaagtgggtctatttaattttattgcttcttacagataaaaaaaaaattatgagttggtttgataaaatattgaaggatttaaaataataataaataacatataatatatgtatataaatttattataatataacatttatctataaaaaagtaaatattgtcataaatctatacaatcgtttagccttgctggacgaatctcaattatttaaacgagagtaaacatatttgactttttggttatttaacaaattattatttaacactatatgaaatttttttttttatcagcaaagaataaaattaaattaagaaggacaatggtgtcccaatccttatacaaccaacttccacaagaaagtcaagtcagagacaacaaaaaaacaagcaaaggaaattttttaatttgagttgtcttgtttgctgcataatttatgcagtaaaacactacacataacccttttagcagtagagcaatggttgaccgtgtgcttagcttcttttattttatttttttatcagcaaagaataaataaaataaaatgagacacttcagggatgtttcaacaagctctagagggcccaattcgccctatagtgagtcgtattacaattcactggccgtcgttttacaacgtcgtgactgggaaaaccctggcgttacccaacttaatcgccttgcagcacatccccctttcgccagctggcgtaatagcgaagaggcccgcaccgatcgcccttcccaacagttgcgcagcctatacgtacgagatccggccggccagatcctgcaggagatccaagcttggcgcgccgttctatagtgtcacctaaatcgtatgtgtatgatacataaggttatgtattaattgtagccgcgttctaacgacaatatgtccatatggtgcactctcagtacaatctgctctgatgccgcatagttaagccagccccgacacccgccaacacccgctgacgcgccctgacgggcttgtctgctcccggcatccgcttacagacaagctgtgaccgtctccgggagctgcatgtgtcagaggttttcaccgtcatcaccgaaacgcgcgagacgaaagggcctcgtgatacgcctatttttataggttaatgtcatgaccaaaatcccttaacgtgagttttcgttccactgagcgtcagaccccgtagaaaagatcaaaggatcttcttgagatcctttttttctgcgcgtaatctgctgcttgcaaacaaaaaaaccaccgctaccagcggtggtttgtttgccggatcaagagctaccaactctttttccgaaggtaactggcttcagcagagcgcagataccaaatactgtccttctagtgtagccgtagttaggccaccacttcaagaactctgtagcaccgcctacatacctcgctctgctaatcctgttaccagtggctgctgccagtggcgataagtcgtgtcttaccgggttggactcaagacgatagttaccggataaggcgcagcggtcgggctgaacggggggttcgtgcacacagcccagcttggagcgaacgacctacaccgaactgagatacctacagcgtgagcattgagaaagcgccacgcttcccgaagggagaaaggcggacaggtatccggtaagcggcagggtcggaacaggagagcgcacgagggagcttccagggggaaacgcctggtatctttatagtcctgtcgggtttcgccacctctgacttgagcgtcgatttttgtgatgctcgtcaggggggcggagcctatggaaaaacgccagcaacgcggcctttttacggttcctggccttttgctggccttttgctcacatgttctttcctgcgttatcccctgattctgtggataaccgtattaccgcctttgagtgagctgataccgctcgccgcagccgaacgaccgagcgcagcgagtcagtgagcgaggaagcggaagagcgcccaatacgcaaaccgcctctccccgcgcgttggccgattcattaatgcaggttgatcgattcgacatcgatctagtaacatagatgacaccgcgcgcgataatttatcctagtttgcgcgctatattttgttttctatcgcgtattaaatgtataattgcgggactctaatcataaaaacccatctcataaataacgtcatgcattacatgttaattattacatgcttaacgtaattcaacagaaattatatgataatcatcgcaagaccggcaacaggattcaatcttaagaaactttattgccaaatgtttgaacgatctgcttcgacgcactccttctttaggtacctcactattcctttgccctcggacgagtgctggggcgtcggtttccactatcggcgagtacttctacacagccatcggtccagacggccgcgcttctgcgggcgatttgtgtacgcccgacagtcccggctccggatcggacgattgcgtcgcatcgaccctgcgcccaagctgcatcatcgaaattgccgtcaaccaagctctgatagagttggtcaagaccaatgcggagcatatacgcccggagccgcggcgatcctgcaagctccggatgcctccgctcgaagtagcgcgtctgctgctccatacaagccaaccacggcctccagaagaagatgttggcgacctcgtattgggaatccccgaacatcgcctcgctccagtcaatgaccgctgttatgcggccattgtccgtcaggacattgttggagccgaaatccgcgtgcacgaggtgccggacttcggggcagtcctcggcccaaagcatcagctcatcgagagcctgcgcgacggacgcactgacggtgtcgtccatcacagtttgccagtgatacacatggggatcagcaatcgcgcatatgaaatcacgccatgtagtgtattgaccgattccttgcggtccgaatgggccgaacccgctcgtctggctaagatcggccgcagcgatcgcatccatggcctccgcgaccggctgcagaacagcgggcagttcggtttcaggcaggtcttgcaacgtgacaccctgtgcacggcgggagatgcaataggtcaggctctcgctgaattccccaatgtcaagcacttccggaatcgggagcgcggccgatgcaaagtgccgataaacataacgatctttgtagaaaccatcggcgcagctatttacccgcaggacatatccacgccctcctacatcgaagctgaaagcacgagattcttcgccctccgagagctgcatcaggtcggagacgctgtcgaacttttcgatcagaaacttctcgacagacgtcgcggtgagttcaggctttttcatggtttaataagaagagaaaagagttcttttgttatggctgaagtaatagagaaatgagctcgagcgtgtcctctccaaatgaaatgaacttccttatatagaggaagggtcttgcgaaggatagtgggattgtgcgtcatcccttacgtcagtggagatgtcacatcaatccacttgctttgaagacgtggttggaacgtcttctttttccacgatgctcctcgtgggtgggggtccatctttgggaccactgtcggcagaggcatcttgaatgatagcctttcctttatcgcaatgatggcatttgtaggagccaccttccttttctactgtcctttcgatgaagtgacagatagctgggcaatggaatccgaggaggtttcccgaaattatcctttgttgaaaagtctcaatagccctttggtcttctgagactgtatctttgacatttttggagtagaccagagtgtcgtgctccaccatgttgacgaagattttcttcttgtcattgagtcgtaaaagactctgtatgaactgttcgccagtcttcacggcgagttctgttagatcctcgatttgaatcttagactccatgcatggccttagattcagtaggaactacctttttagagactccaatctctattacttgccttggtttatgaagcaagccttgaatcgtccatactggaatagtacttctgatcttgagaaatatgtctttctctgtgttcttgatgcaattagtcctgaatcttttgactgcatctttaaccttcttgggaaggtatttgatctcctggagattgttactcgggtagatcgtcttgatgagacctgctgcgtaggcctctctaaccatctgtgggtcagcattctttctgaaattgaagaggctaaccttctcattatcagtggtgaacatagtgtcgtcaccttcaccttcgaacttccttcctagatcgtaaagatagaggaaatcgtccattgtaatctccggggcaaaggagatctcttttggggctggatcactgctgggccttttggttcctagcgtgagccagtgggctttttgctttggtgggcttgttagggccttagcaaagctcttgggcttgagttgagcttctcctttggggatgaagttcaacctgtctgtttgctgacttgttgtgtacgcgtcagctgctgctcttgcctctgtaatagtggcaaatttcttgtgtgcaactccgggaacgccgtttgttgccgcctttgtacaaccccagtcatcgtatataccggcatgtggaccgttatacacaacgtagtagttgatatgagggtgttgaatacccgattctgctctgagaggagcaactgtgctgttaagctcagatttttgtgggattggaattggatcgatctcgatcccgcgaaattaatacgactcactatagggagaccacaacggtttccctctagaaataattttgtttaactttaagaaggagatatacccatggaaaagcctgaactcaccgcgacgtctgtcgagaagtttctgatcgaaaagttcgacagcgtctccgacctgatgcagctctcggagggcgaagaatctcgtgctttcagcttcgatgtaggagggcgtggatatgtcctgcgggtaaatagctgcgccgatggtttctacaaagatcgttatgtttatcggcactttgcatcggccgcgctcccgattccggaagtgcttgacattggggaattcagcgagagcctgacctattgcatctcccgccgtgcacagggtgtcacgttgcaagacctgcctgaaaccgaactgcccgctgttctgcagccggtcgcggaggctatggatgcgatcgctgcggccgatcttagccagacgagcgggttcggcccattcggaccgcaaggaatcggtcaatacactacatggcgtgatttcatatgcgcgattgctgatccccatgtgtatcactggcaaactgtgatggacgacaccgtcagtgcgtccgtcgcgcaggctctcgatgagctgatgctttgggccgaggactgccccgaagtccggcacctcgtgcacgcggatttcggctccaacaatgtcctgacggacaatggccgcataacagcggtcattgactggagcgaggcgatgttcggggattcccaatacgaggtcgccaacatcttcttctggaggccgtggttggcttgtatggagcagcagacgcgctacttcgagcggaggcatccggagcttgcaggatcgccgcggctccgggcgtatatgctccgcattggtcttgaccaactctatcagagcttggttgacggcaatttcgatgatgcagcttgggcgcagggtcgatgcgacgcaatcgtccgatccggagccgggactgtcgggcgtacacaaatcgcccgcagaagcgcggccgtctggaccgatggctgtgtagaagtactcgccgatagtggaaaccgacgccccagcactcgtccgagggcaaaggaatagtgaggtacagcttggatcgatccggctgctaacaaagcccgaaaggaagctgagttggctgctgccaccgctgagcaataactagcataaccccttggggcctctaaacgggtcttgaggggttttttgctgaaaggaggaactatatccggatgatcgggcgcgccgtcgacggatccactagttctagagcggcccgcgccgtcgacggatataatgagccgtaaacaaagatgattaagtagtaattaatacgtactagtaaaagtggcaaaagataacgagaaagaaccaatttctttgcattcggccttagcggaaggcatatataagctttgattattttatttagtgtaatgatttcgtacaaccaaagcatttatttagtactctcacacttgtgtcgcggccggccgctacaggaacaggtggtggcggccctcggcgcgctcgtactgctccacgatggtgtagtcctcgttgtgggaggtgatgtccagcttggagtccacgtagtagtagccgggcagctgcacgggcttcttggccatgtagatggacttgaactccaccaggtagtggccgccgtccttcagcttcagggccttgtggatctcgcccttcagcacgccgtcgcgggggtacaggcgctcggtggaggcctcccagcccatagtcttcttctgcattacggggccgtcggaggggaagttcacgccgatgaacttcaccttgtagatgaaggagccgtcctgcagggaggagtcctgggtcacggtcaccacgccgccgtcctcgaagttcatcacgcgctcccacttgaagccctcggggaaggacagcttcttgtagtcggggatgtcggcggggtgcttcacgtacaccttggagccgtactggaactggggggacaggatgtcccaggcgaagggcagggggccgcccttggtcaccttcagcttggcggtctgggtgccctcgtaggggcggccctcgccctcgccctcgatctcgaactcgtggccgttcacggagccctccatgcgcaccttgaagcgcatgaactccttgatgacgtcctcggaggaggccatgggccgcttggggggctatggaagactttcttagttagttgtgtgaataagcaatgttgggagaatcgggactacttataggataggaataaaacagaaaagtattaagtgctaatgaaatatttagactgataattaaaatcttcacgtatgtccacttgatataaaaacgtcaggaataaaggaagtacagtagaatttaaaggtactctttttatatatacccgtgttctctttttggctagctagttgcataaaaaataatctatatttttatcattattttaaatatcttatgagatggtaaatatttatcataattttttttactattatttattatttgtgtgtgtaatacatatagaagttaattacaaattttatttactttttcattattttgatatgattcaccattaatttagtgttattatttataatagttcattttaatctttttgtatatattatgcgtgcagtacttttttcctacatataactactattacattttatttatataatatttttattaatgaattttcgtgataatatgtaatattgttcattattatttcagattttttaaaaatatttgtgttattatttatgaaatatgtaatttttttagtatttgattttatgatgataaagtgttctaaattcaaaagaagggggaaagcgtaaacattaaaaaacgtcatcaaacaaaaacaaaatcttgttaataaagataaaactgtttgttttgatcactgttatttcgtaatataaaaacattatttatatttatattgttgacaaccaaatttgcctatcaaatctaaccaatataatgcatgcgtggcaggtaatgtactaccatgaacttaagtcatgacataataaaccgtgaatctgaccaatgcatgtacctanctaaattgtatttgtgacacgaagcaaatgattcaattcacaatggagatgggaaacaaataatgaagaacccagaactaagaaagcttttctgaaaaataaaataaaggcaatgtcaaaagtatactgcatcatcagtccagaaagcacatgatatttttttatcagtatcaatgcagctagttttattttacaatatcgatatagctagtttaaatatattgcagctagatttataaatatttgtgttattatttatcatttgtgtaatcctgtttttagtattttagtttatatatgatgataatgtattccaaatttaaaagaagggaaataaatttaaacaagaaaaaaagtcatcaaacaaaaaacaaatgaaagggtggaaagatgttaccatgtaatgtgaatgttacagtatttcttttattatagagttaacaaattaactaatatgattttgttaataatgataaaatattttttttattattatttcataatataaaaatagtttacttaatataaaaaaaattctatcgttcacaacaaagttggccacctaatttaaccatgcatgtacccatggaccatattaggtaaccatcaaacctgatgaagagataaagagatgaagacttaagtcataacacaaaaccataaaaaacaaaaatacaatcaaccgtcaatctgaccaatgcatgaaaaagctgcaatagtgagtggcgacacaaagcacatgattttcttacaacggagataaaaccaaaaaaatatttcatgaacaacctagaacaaataaagcttttatataataaatatataaataaataaaggctatggaataatatacttcaatatatttggattaaataaattgttggcggggttgatatatttatacacacctaaagtcacttcaatctcattttcacttaacttttattttttttttctttttatttatcataaagagaatattgataatatactttttaacatatttttatgacattttttattggtgaaaacttattaaaaatcataaattttgtaagttagatttatttaaagagttcctcttcttattttaaattttttaataaatttttaaataactaaaatttgtgttaaaaatgttaaaaaagtgtgttattaacccttctcttcgaggatccgtaccgagctcggatcctctagaaatccgtcaacatggtggagcacgacactctcgtctactccaagaatatcaaagatacagtctcagaagaccaaagggctattgagacttttcaacaaagggtaatatcgggaaacctcctcggattccattgcccagctatctgtcacttcatcaaaaggacagtagaaaaggaaggtggcacctacaaatgccatcattgcgataaaggaaaggctatcgttcaagatgcctctgccgacagtggtcccaaagatggacccccacccacgaggagcatcgtggaaaaagaagacgttccaaccacgtcttcaaagcaagtggattgatgtgatgatcctatgcgtatggtatgacgtgtgttcaagatgatgacttcaaacctacctatgacgtatggtatgaacgtgtgtcgactgatgacttagatccactcgagcggctataaatacgtacctacgcaccctgcgctaccatccctagagctgcagcttatttttacaacaattaccaacaacaacaaacaacaaacaacattacaattactatttacaattacagtcgacccgggatcgtacctctagggtggcggccgcatggagagatctcaacggcagtctcctccgccaccgtcgccgtcctcctcctcgtcctccgtctccgcggacaccgtcctcgtccctcccggaaagaggcggagggcggcgacggccaaggccggcgccgagcctaataagaggatccgcaaggaccccgccgccgccgccgcggggaagaggagctccgtctacaggggagtcaccaggcacaggtggacgggcaggttcgaggcgcatctctgggacaagcactgcctcgccgcgctccacaacaagaagaaaggcaggcaagtctacctgggggcgtatgacagcgaggaggcagctgctcgtgcctatgacctcgcagctctcaagtactggggtcctgagactctgctcaacttccctgtggaggattactccagcgagatgccggagatggaggccgtgtcccgggaggagtacctggcctccctccgccgcaggagcagcggcttctccaggggcgtctccaagtacagaggcgtcgccaggcatcaccacaacgggaggtgggaggcacggattgggcgagtctttgggaacaagtacctctacttgggaacatttgacactcaagaagaggcagccaaggcctatgaccttgcggccattgaataccgtggcgtcaatgctgtaaccaacttcgacatcagctgctacctggaccacccgctgttcctggcacagctccaacaggagccacaggtggtgccggcactcaaccaagaacctcaacctgatcagagcgaaaccggaactacagagcaagagccggagtcaagcgaagccaagacaccggatggcagtgcagaacccgatgagaacgcggtgcctgacgacaccgcggagcccctcaccacagtcgacgacagcatcgaagagggcttgtggagcccttgcatggattacgagctagacaccatgtcgagaccaaactttggcagctcaatcaatctgagcgagtggttcgctgacgcagacttcgactgcaacatcggatgcctgttcgatgggtgttctgcggctgacgaaggaagcaaggatggtgtaggtctggcagatttcagtctgtttgaggcaggtgatgtccagctgaaggatgttctttcggatatggaagaggggatacaacctccagcgatgatcagtgtgtgcaacgc

SEQ ID NO: 35 - DNA, 19472 bp, Artificial Sequence
  vector pKR1221
  misc_feature (15083)..(15083): n is a, c, g, or t
cgcgccagatcctctagagtcgacctgcaggcatgcaagcttggcgtaatcatggtcatagctgtttcctgtgtgaaattgttatccgctcacaattccacacaacatacgagccggaagcataaagtgtaaagcctggggtgcctaatgagtgagctaactcacattaattgcgttgcgctcactgcccgctttccagtcgggaaacctgtcgtgccagctgcattaatgaatcggccaacgcgcggggagaggcggtttgcgtattggatcgatccctgaaagcgacgttggatgttaacatctacaaattgccttttcttatcgaccatgtacgtaagcgcttacgtttttggtggacccttgaggaaactggtagctgttgtgggcctgtggtctcaagatggatcattaatttccaccttcacctacgatggggggcatcgcaccggtgagtaatattgtacggctaagagcgaatttggcctgtagacctcaattgcgagctttctaatttcaaactattcgggcctaacttttggtgtgatgatgctgactggcaggatatataccgttgtaatttgagctcgtgtgaataagtcgctgtgtatgtttgtttgattgtttctgttggagtgcagcccatttcaccggacaagtcggctagattgatttagccctgatgaactgccgaggggaagccatcttgagcgcggaatgggaatggatttcgttgtacaacgagacgacagaacacccacgggaccgagcttcgcgagcttttgtatccgtggcatccttggtccgggcgatttgttcacgtccatgaggcgctctccaaaggaacgcatattttccggtgcaacctttccggttcttcctctactcgacctcttgaagtcccagcatgaatgttcgaccgctccgcaagcggatctttggcgcaaccagccggtttcgcacgtcgattctcgcgagcctgcatactttggcaagattgctgaatgacgctgatgcttcatcgcaatctgcgataatggggtaagtatccggtgaaggccgcaggtcaggccgcctgagcactcagtgtcttggatgtccagttccacggcagctgttgctcaagcctgctgatcggagcgtccgcaaggtcggcgcggacgtcggcaagccaggcctgcggatcgatgttattgagcttggcgctcatgatcagtgtcgccatgaacgccgcacgttcagcacaacgatccgatccggcaaacagccatgacttcctgccgagtacatagcctctgagcgttcgttcggcagcattgttcgtcaggcaaatcgggccgtcatcgaggaatgacgtaatgccatcccatcgcttgagcatgtaatttatcgcctcggcgacgggagaactgcgcgacaatttcccccgctcggtttcgagccaatcatgcagctcttcggcgagtgaccttgatcaggccaccgccacgaccgcggaagacgaacagatgcctgcgcatcggatcgcgcttcagcgtctcttgcaccatcagcgacaaaccgggaaagcctttgcgcatgtccgtacttatgtcgccacttgggagggcttcgtctacgtggccttcgtgatcgacgtcttcgcccgtcgcattgtcggatggcgggcgagccggacagcacatgcaggctttgtcctcgatgccctcgaggaggctcatcatgatcggcgtcccgctcatggcggcctagtgcatcactcggatcgcggtgttcaatacgtgtcctttcgctattccgagcggttggcagaagcaggtatcgagccatctatcggaagcgtcggcgacagcacgacaacgccctcgcagaagcgatcaacggtctttacaaggccgaggtcattcatcggcgtggaccatggaggagcttcgaagcggtcgagttcgctaccttggaatggatagactggttcaaccacggcggcttttgaagcccatcggcaatataccgccagccgaagacgaggatcagtattacgccatgctggacgaagcagccatggctgcgcattttaacgaaatggcctccggcaaacccggtgcggttcacttgttgcgtgggaaagttcacgggactccgcgcacgagccttcttcgtaatagccatatcgaccgaattgacctgcaggggggggggggaaagccacgttgtgtctcaaaatctctgatgttacattgcacaagataaaaatatatcatcatgaacaataaaactgtctgcttacataaacagtaatacaaggggtgttatgagccatattcaacgggaaacgtcttgctcgaggccgcgattaaattccaacatggatgctgatttatatgggtataaatgggctcgcgataatgtcgggcaatcaggtgcgacaatctatcgattgtatgggaagcccgatgcgccagagttgtttctgaaacatggcaaaggtagcgttgccaatgatgttacagatgagatggtcagactaaactggctgacggaatttatgcctcttccgaccatcaagcattttatccgtactcctgatgatgcatggttactcaccactgcgatccccgggaaaacagcattccaggtattagaagaatatcctgattcaggtgaaaatattgttgatgcgctggcagtgttcctgcgccggttgcattcgattcctgtttgtaattgtccttttaacagcgatcgcgtatttcgtctcgctcaggcgcaatcacgaatgaataacggtttggttgatgcgagtgattttgatgacgagcgtaatggctggcctgttgaacaagtctggaaagaaatgcataagcttttgccattctcaccggattcagtcgtcactcatggtgatttctcacttgataaccttatttttgacgaggggaaattaataggttgtattgatgttggacgagtcggaatcgcagaccgataccaggatcttgccatcctatggaactgcctcggtgagttttctccttcattacagaaacggctttttcaaaaatatggtattgataatcctgatatgaataaattgcagtttcatttgatgctcgatgagtttttctaatcagaattggttaattggttgtaacactggcagagcattacgctgacttgacgggacggcggctttgttgaataaatcgaacttttgctgagttgaaggatcagatcacgcatcttcccgacaacgcagaccgttccgtggcaaagcaaaagttcaaaatcaccaactggtccacctacaacaaagctctcatcaaccgtggctccctcactttctggctggatgatggggcgattcaggcctggtatgagtcagcaacaccttcttcacgaggcagacctcagcgcccccccccccctgcaggtcttttccaatgatgagcacttttaaagttctgctatgtggcgcggtattatcccgtgttgacgccgggcaagagcaactcggtcgccgcatacactattctcagaatgacttggttgagtactcaccagtcacagaaaagcatcttacggatggcatgacagtaagagaattatgcagtgctgccataaccatgagtgataacactgcggccaacttacttctgacaacgatcggaggaccgaaggagctaaccgcttttttgcacaacatgggggatcatgtaactcgccttgatcgttgggaaccggagctgaatgaagccataccaaacgacgagcgtgacaccacgatgcctgtagcaatggcaacaacgttgcgcaaactattaactggcgaactacttactctagcttcccggcaacaattaatagactggatggaggcggataaagttgcaggaccacttctgcgctcggcccttccggctggctggtttattgctgataaatctggagccggtgagcgtgggtctcgcggtatcattgcagcactggggccagatggtaagccctcccgtatcgtagttatctacacgacggggagtcaggcaactatggatgaacgaaatagacagatcgctgagataggtgcctcactgattaagcattggtaactgtcagaccaagtttactcatatatactttagattgatttaaaacttcatttttaatttaaaaggatctaggtgaagatcctttttgataatctcatgaccaaaatcccttaacgtgagttttcgttccactgagcgtcagaccccgtagaaaagatcaaaggatcttcttgagatcctttttttctgcgcgtaatctgctgcttgcaaacaaaaaaaccaccgctaccagcggtggtttgtttgccggatcaagagctaccaactctttttccgaaggtaactggcttcagcagagcgcagataccaaatactgtccttctagtgtagccgtagttaggccaccacttcaagaactctgtagcaccgcctacatacctcgctctgctaatcctgttaccagtggctgctgccagtggcgataagtcgtgtcttaccgggttggactcaagacgatagttaccggataaggcgcagcggtcgggctgaacggggggttcgtgcacacagcccagcttggagcgaacgacctacaccgaactgagatacctacagcgtgagctatgagaaagcgccacgcttcccgaagggagaaaggcggacaggtatccggtaagcggcagggtcggaacaggagagcgcacgagggagcttccagggggaaacgcctggtatctttatagtcctgtcgggtttcgccacctctgacttgagcgtcgatttttgtgatgctcgtcaggggggcggagcctatggaaaaacgccagcaacgcggcctttttacggttcctggccttttgctggccttttgctcacatgttctttcctgcgttatcccctgattctgtggataaccgtattaccgcctttgagtgagctgataccgctcgccgcagccgaacgaccgagcgcagcgagtcagtgagcgaggaagcggaagagcgcctgatgcggtattttctccttacgcatctgtgcggtatttcacaccgcatatggtgcactctcagtacaatctgctctgatgccgcatagttaagccagtatacactccgctatcgctacgtgactgggtcatggctgcgccccgacacccgccaacacccgctgacgcgccctgacgggcttgtctgctcccggcatccgcttacagacaagctgtgaccgtctccgggagctgcatgtgtcagaggttttcaccgtcatcaccgaaacgcgcgaggcagggtgccttgatgtgggcgccggcggtcgagtggcgacggcgcggcttgtccgcgccctggtagattgcctggccgtaggccagccatttttgagcggccagcggccgcgataggccgacgcgaagcggcggggcgtagggagcgcagcgaccgaagggtaggcgctttttgcagctcttcggctgtgcgctggccagacagttatgcacaggccaggcgggttttaagagttttaataagttttaaagagttttaggcggaaaaatcgccttttttctcttttatatcagtcacttacatgtgtgaccggttcccaatgtacggctttgggttcccaatgtacgggttccggttcccaatgtacggctttgggttcccaatgtacgtgctatccacaggaaagagaccttttcgacctttttcccctgctagggcaatttgccctagcatctgctccgtacattaggaaccggcggatgcttcgccctcgatcaggttgcggtagcgcatgactaggatcgggccagcctgccccgcctcctccttcaaatcgtactccggcaggtcatttgacccgatcagcttgcgcacggtgaaacagaacttcttgaactctccggcgctgccactgcgttcgtagatcgtcttgaacaaccatctggcttctgccttgcctgcggcgcggcgtgccaggcggtagagaaaacggccgatgccgggatcgatcaaaaagtaatcggggtgaaccgtcagcacgtccgggttcttgccttctgtgatctcgcggtacatccaatcagctagctcgatctcgatgtactccggccgcccggtttcgctctttacgatcttgtagcggctaatcaaggcttcaccctcggataccgtcaccaggcggccgttcttggccttcttcgtacgctgcatggcaacgtgcgtggtgtttaaccgaatgcaggtttctaccaggtcgtctttctgctttccgccatcggctcgccggcagaacttgagtacgtccgcaacgtgtggacggaacacgcggccgggcttgtctcccttcccttcccggtatcggttcatggattcggttagatgggaaaccgccatcagtaccaggtcgtaatcccacacactggccatgccggccggccctgcggaaacctctacgtgcccgtctggaagctcgtagcggatcacctcgccagctcgtcggtcacgcttcgacagacggaaaacggccacgtccatgatgctgcgactatcgcgggtgcccacgtcatagagcatcggaacgaaaaaatctggttgctcgtcgcccttgggcggcttcctaatcgacggcgcaccggctgccggcggttgccgggattctttgcggattcgatcagcggccgcttgccacgattcaccggggcgtgcttctgcctcgatgcgttgccgctgggcggcctgcgcggccttcaacttctccaccaggtcatcacccagcgccgcgccgatttgtaccgggccggatggtttgcgaccgctcacgccgattcctcgggcttgggggttccagtgccattgcagggccggcagacaacccagccgcttacgcctggccaaccgcccgttcctccacacatggggcattccacggcgtcggtgcctggttgttcttgattttccatgccgcctcctttagccgctaaaattcatctactcatttattcatttgctcatttactctggtagctgcgcgatgtattcagatagcagctcggtaatggtcttgccttggcgtaccgcgtacatcttcagcttggtgtgatcctccgccggcaactgaaagttgacccgcttcatggctggcgtgtctgccaggctggccaacgttgcagccttgctgctgcgtgcgctcggacggccggcacttagcgtgtttgtgcttttgctcattttctctttacctcattaactcaaatgagttttgatttaatttcagcggccagcgcctggacctcgcgggcagcgtcgccctcgggttctgattcaagaacggttgtgccggcggcggcagtgcctgggtagctcacgcgctgcgtgatacgggactcaagaatgggcagctcgtacccggccagcgcctcggcaacctcaccgccgatgcgcgtgcctttgatcgcccgcgacacgacaaaggccgcttgtagccttccatccgtgacctcaatgcgctgcttaaccagctccaccaggtcggcggtggcccatatgtcgtaagggcttggctgcaccggaatcagcacgaagtcggctgccttgatcgcggacacagccaagtccgccgcctggggcgctccgtcgatcactacgaagtcgcgccggccgatggccttcacgtcgcggtcaatcgtcgggcggtcgatgccgacaacggttagcggttgatcttcccgcacggccgcccaatcgcgggcactgccctggggatcggaatcgactaacagaacatcggccccggcgagttgcagggcgcgggctagatgggttgcgatggtcgtcttgcctgacccgcctttctggttaagtacagcgataacttcatgcgttcccttgcgtatttgtttatttactcatcgcatcatatacgcagcgaccgcatgacgcaagctgttttactcaaatacacatcacctttttagacggcggcgctcggtttcttcagcggccaagctggccggccaggccgccagcttggcatcagacaaaccggccaggatttcatgcagccgcacggttgagacgtgcgcgggcggctcgaacacgtacccggccgcgatcatctccgcctcgatctcttcggtaatgaaaaacggttcgtcctggccgtcctggtgcggtttcatgcttgttcctcttggcgttcattctcggcggccgccagggcgtcggcctcggtcaatgcgtcctcacggaaggcaccgcgccgcctggcctcggtgggcgtcacttcctcgctgcgctcaagtgcgcggtacagggtcgagcgatgcacgccaagcagtgcagccgcctctttcacggtgcggccttcctggtcgatcagctcgcgggcgtgcgcgatctgtgccggggtgagggtagggcgggggccaaacttcacgcctcgggccttggcggcctcgcgcccgctccgggtgcggtcgatgattagggaacgctcgaactcggcaatgccggcgaacacggtcaacaccatgcggccggccggcgtggtggtgtcggcccacggctctgccaggctacgcaggcccgcgccggcctcctggatgcgctcggcaatgtccagtaggtcgcgggtgctgcgggccaggcggtctagcctggtcactgtcacaacgtcgccagggcgtaggtggtcaagcatcctggccagctccgggcggtcgcgcctggtgccggtgatcttctcggaaaacagcttggtgcagccggccgcgtgcagttcggcccgttggttggtcaagtcctggtcgtcggtgctgacgcgggcatagcccagcaggccagcggcggcgctcttgttcatggcgtaatgtctccggttctagtcgcaagtattctactttatgcgactaaaacacgcgacaagaaaacgccaggaaaagggcagggcggcagcctgtcgcgtaacttaggacttgtgcgacatgtcgttttcagaagacggctgcactgaacgtcagaagccgactgcactatagcagcggaggggttggaccacaggacgggtgtggtcgccatgatcgcgtagtcgatagtggctccaagtagcgaagcgagcaggactgggcggcggccaaagcggtcggacagtgctccgagaacgggtgcgcatagaaattgcatcaacgcatatagcgctagcagcacgccatagtgactggcgatgctgtcggaatggacgatatcccgcaagaggcccggcagtaccggcataaccaagcctatgcctacagcatccagggtgacggtgccgaggatgacgatgagcgcattgttagatttcatacacggtgcctgactgcgttagcaatttaactgtgataaactaccgcattaaagctagcttgcttggtcgttccgcgtgaacgtcggctcgattgtacctgcgttcaaatactttgcgatcgtgttgcgcgcctgcccggtgcgtcggctgatctcacggatcgactgcttctctcgcaacgccatccgacggatgatgtttaaaagtcccatgtggatcactccgttgccccgtcgctcaccgtgttggggggaaggtgcacatggctcagttctcaatggaaattatctgcctaaccggctcagttctgcgtagaaaccaacatgcaagctccaccgggtgcaaagcggcagcggcggcaggatatattcaattgtaaatggcttcatgtccgggaaatctacatggatcagcaatgagtatgatggtcaatatggagaaaaagaaagagtaattaccaattttttttcaattcaaaaatgtagatgtccgcagcgttattataaaatgaaagtacattttgataaaacgacaaattacgatccgtcgtatttataggcgaaagcaataaacaaattattctaattcggaaatctttatttcgacgtgtctacattcacgtccaaatgggggcttagatgagaaacttcacgatcgatgccttgatttcgccattcccagatacccatttcatcttcagattggtctgagattatgcgaaaatatacactcatatacataaatactgacagtttgagctaccaattcagtgtagcccattacctcacataattcactcaaatgctaggcagtctgtcaactcggcgtcaatttgtcggccactatacgatagttgcgcaaattttcaaagtcctggcctaacatcacacctctgtcggcggcgggtcccatttgtgataaatccaccatatcgaattaattcagactcctttgccccagagatcacaatggacgacttcctctatctctacgatctagtcaggaagttcgacggagaaggtgacgataccatgttcaccactgataatgagaagattagccttttcaatttcagaaagaatgctaacccacagatggttagagaggcttacgcagcaggtctcatcaagacgatctacccgagcaataatctccaggagatcaaataccttcccaagaaggttaaagatgcagtcaaaagattcaggactaactgcatcaagaacacagagaaagatatatttctcaagatcagaagtactattccagtatggacgattcaaggcttgcttcacaaaccaaggcaagtaatagagattggagtctctaaaaaggtagttcccactgaatcaaaggccatggagtcaaagattcaaatagaggacctaacagaactcgccgtaaagactggcgaacagttcatacagagtctcttacgactcaatgacaagaagaaaatcttcgtcaacatggtggagcacgacacgcttgtctactccaaaaatatcaaagatacagtctcagaagaccaaagggcaattgagacttttcaacaaagggtaatatccggaaacctcctcggattccattgcccagctatctgtcactttattgtgaagatagtggaaaaggaaggtggctcctacaaatgccatcattgcgataaaggaaaggccatcgttgaagatgcctctgccgacagtggtcccaaagatggacccccacccacgaggagcatcgtggaaaaagaagacgttccaaccacgtcttcaaagcaagtggattgatgtgatatctccactgacgtaagggatgacgcacaatcccactatccttcgcaagacccttcctctatataaggaagttcatttcatttggagaggacacgctgaaatcaccagtctccaagcttgcggggatcgtttcgcatgattgaacaagatggattgcacgcaggttctccggccgcttgggtggagaggctattcggctatgactgggcacaacagacaatcggctgctctgatgccgccgtgttccggctgtcagcgcaggggcgcccggttctttttgtcaagaccgacctgtccggtgccctgaatgaactgcaggacgaggcagcgcggctatcgtggctggccacgacgggcgttccttgcgcagctgtgctcgacgttgtcactgaagcgggaagggactggctgctattgggcgaagtgccggggcaggatctcctgtcatctcaccttgctcctgccgagaaagtatccatcatggctgatgcaatgcggcggctgcatacgcttgatccggctacctgcccattcgaccaccaagcgaaacatcgcatcgagcgagcacgtactcggatggaagccggtcttgtcgatcaggatgatctggacgaagagcatcaggggctcgcgccagccgaactgttcgccaggctcaaggcgcgcatgcccgacggcgaggatctcgtcgtgacccatggcgatgcctgcttgccgaatatcatggtggaaaatggccgcttttctggattcatcgactgtggccggctgggtgtggcggaccgctatcaggacatagcgttggctacccgtgatattgctgaagagcttggcggcgaatgggctgaccgcttcctcgtgctttacggtatcgccgctcccgattcgcagcgcatcgccttctatcgccttcttgacgagttcttctgagcgggactctggggttcgaaatgaccgaccaagcgacgcccaacctgccatcacgagatttcgattccaccgccgccttctatgaaaggttgggcttcggaatcgttttccgggacgccggctggatgatcctccagcgcggggatctcatgctggagttcttcgcccaccccggatcgatccaacacttacgtttgcaacgtccaagagcaaatagaccacgaacgccggaaggttgccgcagcgtgtggattgcgtctcaattctctcttgcaggaatgcaatgatgaatatgatactgactatgaaactttgagggaatactgcctagcaccgtcacctcataacgtgcatcatgcatgccctgacaacatggaacatcgctatttttctgaagaattatgctcgttggaggatgtcgcggcaattgcagctattgccaacatcgaactacccctcacgcatgcattcatcaatattattcatgcggggaaaggcaagattaatccaactggcaaatcatccagcgtgattggtaacttcagttccagcgacttgattcgttttggtgctacccacgttttcaataaggacgagatggtggagtaaagaaggagtgcgtcgaagcagatcgttcaaacatttggcaataaagtttcttaagattgaatcctgttgccggtcttgcgatgattatcatataatttctgttgaattacgttaagcatgtaataattaacatgtaatgcatgacgttatttatgagatgggtttttatgattagagtcccgcaattatacatttaatacgcgatagaaaacaaaatatagcgcgcaaactaggataaattatcgcgcgcggtgtcatctatgttactagatcgatcaaacttcggtactgtgtaatgacgatgagcaatcgagaggctgactaacaaaaggtacatcgcgatggatcgatccattcgccattcaggctgcgcaactgttgggaagggcgatcggtgcgggcctcttcgctattacgccagctggcgaaagggggatgtgctgcaaggcgattaagttgggtaacgccagggttttcccagtcacgacgttgtaaaacgacggccagtgaattcctgcagcccgggggatccgcccactcgaggcgcgccgtcgacggatataatgagccgtaaacaaagatgattaagtagtaattaatacgtactagtaaaagtggcaaaagataacgagaaagaaccaatttctttgcattcggccttagcggaaggcatatataagctttgattattttatttagtgtaatgatttcgtacaaccaaagcatttatttagtactctcacacttgtgtcgcggccggccgctacaggaacaggtggtggcggccctcggcgcgctcgtactgctccacgatggtgtagtcctcgttgtgggaggtgatgtccagcttggagtccacgtagtagtagccgggcagctgcacgggcttcttggccatgtagatggacttgaactccaccaggtagtggccgccgtccttcagcttcagggccttgtggatctcgcccttcagcacgccgtcgcgggggtacaggcgctcggtggaggcctcccagcccatagtcttcttctgcattacggggccgtcggaggggaagttcacgccgatgaacttcaccttgtagatgaaggagccgtcctgcagggaggagtcctgggtcacggtcaccacgccgccgtcctcgaagttcatcacgcgctcccacttgaagccctcggggaaggacagcttcttgtagtcggggatgtcggcggggtgcttcacgtacaccttggagccgtactggaactggggggacaggatgtcccaggcgaagggcagggggccgcccttggtcaccttcagcttggcggtctgggtgccctcgtaggggcggccctcgccctcgccctcgatctcgaactcgtggccgttcacggagccctccatgcgcaccttgaagcgcatgaactccttgatgacgtcctcggaggaggccatgggccgcttggggggctatggaagactttcttagttagttgtgtgaataagcaatgttgggagaatcgggactacttataggataggaataaaacagaaaagtattaagtgctaatgaaatatttagactgataattaaaatcttcacgtatgtccacttgatataaaaacgtcaggaataaaggaagtacagtagaatttaaaggtactctttttatatatacccgtgttctctttttggctagctagttgcataaaaaataatctatatttttatcattattttaaatatcttatgagatggtaaatatttatcataattttttttactattatttattatttgtgtgtgtaatacatatagaagttaattacaaattttatttactttttcattattttgatatgattcaccattaatttagtgttattatttataatagttcattttaatctttttgtatatattatgcgtgcagtacttttttcctacatataactactattacattttatttatataatatttttattaatgaattttcgtgataatatgtaatattgttcattattatttcagattttttaaaaatatttgtgttattatttatgaaatatgtaatttttttagtatttgattttatgatgataaagtgttctaaattcaaaagaagggggaaagcgtaaacattaaaaaacgtcatcaaacaaaaacaaaatcttgttaataaagataaaactgtttgttttgatcactgttatttcgtaatataaaaacattatttatatttatattgttgacaaccaaatttgcctatcaaatctaaccaatataatgcatgcgtggcaggtaatgtactaccatgaacttaagtcatgacataataaaccgtgaatctgaccaatgcatgtacctanctaaattgtatttgtgacacgaagcaaatgattcaattcacaatggagatgggaaacaaataatgaagaacccagaactaagaaagcttttctgaaaaataaaataaaggcaatgtcaaaagtatactgcatcatcagtccagaaagcacatgatatttttttatcagtatcaatgcagctagttttattttacaatatcgatatagctagtttaaatatattgcagctagatttataaatatttgtgttattatttatcatttgtgtaatcctgtttttagtattttagtttatatatgatgataatgtattccaaatttaaaagaagggaaataaatttaaacaagaaaaaaagtcatcaaacaaaaaacaaatgaaagggtggaaagatgttaccatgtaatgtgaatgttacagtatttcttttattatagagttaacaaattaactaatatgattttgttaataatgataaaatattttttttattattatttcataatataaaaatagtttacttaatataaaaaaaattctatcgttcacaacaaagttggccacctaatttaaccatgcatgtacccatggaccatattaggtaaccatcaaacctgatgaagagataaagagatgaagacttaagtcataacacaaaaccataaaaaacaaaaatacaatcaaccgtcaatctgaccaatgcatgaaaaagctgcaatagtgagtggcgacacaaagcacatgattttcttacaacggagataaaaccaaaaaaatatttcatgaacaacctagaacaaataaagcttttatataataaatatataaataaataaaggctatggaataatatacttcaatatatttggattaaataaattgttggcggggttgatatatttatacacacctaaagtcacttcaatctcattttcacttaacttttattttttttttctttttatttatcataaagagaatattgataatatactttttaacatatttttatgacattttttattggtgaaaacttattaaaaatcataaattttgtaagttagatttatttaaagagttcctcttcttattttaaattttttaataaatttttaaataactaaaatttgtgttaaaaatgttaaaaaagtgtgttattaacccttctcttcgaggatccgtaccgagctcggatcctctagaaatccgtcaacatggtggagcacgacactctcgtctactccaagaatatcaaagatacagtctcagaagaccaaagggctattgagacttttcaacaaagggtaatatcgggaaacctcctcggattccattgcccagctatctgtcacttcatcaaaaggacagtagaaaaggaaggtggcacctacaaatgccatcattgcgataaaggaaaggctatcgttcaagatgcctctgccgacagtggtcccaaagatggacccccacccacgaggagcatcgtggaaaaagaagacgttccaaccacgtcttcaaagcaagtggattgatgtgatgatcctatgcgtatggtatgacgtgtgttcaagatgatgacttcaaacctacctatgacgtatggtatgaacgtgtgtcgactgatgacttagatccactcgagcggctataaatacgtacctacgcaccctgcgctaccatccctagagctgcagcttatttttacaacaattaccaacaacaacaaacaacaaacaacattacaattactatttacaattacagtcgacccgggatcgtacctctagggtggcggccgcatggagagatctcaacggcagtctcctccgccaccgtcgccgtcctcctcctcgtcctccgtctccgcggacaccgtcctcgtccctcccggaaagaggcggagggcggcgacggccaaggccggcgccgagcctaataagaggatccgcaaggaccccgccgccgccgccgcggggaagaggagctccgtctacaggggagtcaccaggcacaggtggacgggcaggttcgaggcgcatctctgggacaagcactgcctcgccgcgctccacaacaagaagaaaggcaggcaagtctacctgggggcgtatgacagcgaggaggcagctgctcgtgcctatgacctcgcagctctcaagtactggggtcctgagactctgctcaacttccctgtggaggattactccagcgagatgccggagatggaggccgtgtcccgggaggagtacctggcctccctccgccgcaggagcagcggcttctccaggggcgtctccaagtacagaggcgtcgccaggcatcaccacaacgggaggtgggaggcacggattgggcgagtctttgggaacaagtacctctacttgggaacatttgacactcaagaagaggcagccaaggcctatgaccttgcggccattgaataccgtggcgtcaatgctgtaaccaacttcgacatcagctgctacctggaccacccgctgttcctggcacagctccaacaggagccacaggtggtgccggcactcaaccaagaacctcaacctgatcagagcgaaaccggaactacagagcaagagccggagtcaagcgaagccaagacaccggatggcagtgcagaacccgatgagaacgcggtgcctgacgacaccgcggagcccctcaccacagtcgacgacagcatcgaagagggcttgtggagcccttgcatggattacgagctagacaccatgtcgagaccaaactttggcagctcaatcaatctgagcgagtggttcgctgacgcagacttcgactgcaacatcggatgcctgttcgatgggtgttctgcggctgacgaaggaagcaaggatggtgtaggtctggcagatttcagtctgtttgaggcaggtgatgtccagctgaaggatgttctttcggatatggaagaggggatacaacctccagcgatgatcagtgtgtgcaacgcggccgcaagtatgaactaaaatgcatgtaggtgtaagagctcatggagagcatggaatattgtatccgaccatgtaacagtataataactgagctccatctcacttcttctatgaataaacaaaggatgttatgatatattaacactctatctatgcaccttattgttctatgataaatttcctcttattattataaatcatctgaatcgtgacggcttatggaatgcttcaaatagtacaaaaacaaatgtgtactataagactttctaaacaattctaaccttagcattgtgaacgagacataagtgttaagaagacataacaattataatggaagaagtttgtctccatttatatattatatattacccacttatgtattatattaggatgttaaggagacataacaattataaagagagaagtttgtatccatttatatattatatactacccatttatatattatacttatccacttatttaatgtctttataaggtttgatccatgatatttctaatattttagttgatatgtatatgaaagggtactatttgaactctcttactctgtataaaggttggatcatccttaaagtgggtctatttaattttattgcttcttacagataaaaaaaaaattatgagttggtttgataaaatattgaaggatttaaaataataataaataacatataatatatgtatataaatttattataatataacatttatctataaaaaagtaaatattgtcataaatctatacaatcgtttagccttgctggacgaatctcaattatttaaacgagagtaaacatatttgactttttggttatttaacaaattattatttaacactatatgaaatttttttttttatcagcaaagaataaaattaaattaagaaggacaatggtgtcccaatccttatacaaccaacttccacaagaaagtcaagtcagagacaacaaaaaaacaagcaaaggaaattttttaatttgagttgtcttgtttgctgcataatttatgcagtaaaacactacacataacccttttagcagtagagcaatggttgaccgtgtgcttagcttcttttattttatttttttatcagcaaagaataaataaaataaaatgagacacttcagggatgtttcaacaagctctagagggcccaattcgccctatagtgagtcgtattacaattcactggccgtcgttttacaacgtcgtgactgggaaaaccctggcgttacccaacttaatcgccttgcagcacatccccctttcgccagctggcgtaatagcgaagaggcccgcaccgatcgcccttcccaacagttgcgcagcctatacgtacgagatccggccggccagatcctgcaggagatccaagcttgg

SEQ ID NO: 36 - DNA, 1188 bp, Zea mays
atggagagatctcaacggcagtctcctccgccaccgtcgccgtcctcctcctcgtcctccgtctccgcggacaccgtcctcgtccctcccggaaagaggcggagggcggcgacggccaaggccggcgccgagcctaataagaggatccgcaaggaccccgccgccgccgccgcggggaagaggagctccgtctacaggggagtcaccaggcacaggtggacgggcaggttcgaggcgcatctctgggacaagcactgcctcgccgcgctccacaacaagaagaaaggcaggcaagtctacctgggggcgtatgacagcgaggaggcagctgctcgtgcctatgacctcgcagctctcaagtactggggtcctgagactctgctcaacttccctgtggaggattactccagcgagatgccggagatggaggccgtgtcccgggaggagtacctggcctccctccgccgcaggagcagcggcttctccaggggcgtctccaagtacagaggcgtcgccaggcatcaccacaacgggaggtgggaggcacggattgggcgagtctttgggaacaagtacctctacttgggaacatttgacactcaagaagaggcagccaaggcctatgaccttgcggccattgaataccgtggcgtcaatgctgtaaccaacttcgacatcagctgctacctggaccacccgctgttcctggcacagctccaacaggagccacaggtggtgccggcactcaaccaagaacctcaacctgatcagagcgaaaccggaactacagagcaagagccggagtcaagcgaagccaagacaccggatggcagtgcagaacccgatgagaacgcggtgcctgacgacaccgcggagcccctcaccacagtcgacgacagcatcgaagagggcttgtggagcccttgcatggattacgagctagacaccatgtcgagaccaaactttggcagctcaatcaatctgagcgagtggttcgctgacgcagacttcgactgcaacatcggatgcctgttcgatgggtgttctgcggctgacgaaggaagcaaggatggtgtaggtctggcagatttcagtctgtttgaggcaggtgatgtccagctgaaggatgttctttcggatatggaagaggggatacaacctccagcgatgatcagtgtgtgcaactaa

SEQ ID NO: 37 - protein, 395 aa, Zea mays
MERSQRQSPPPPSPSSSSSSVSADTVLVPPGKRRRAATAKAGAEPNKRIRKDPAAAAAGKRSSVYRGVTRHRWTGRFEAHLWDKHCLAALHNKKKGRQVYLGAYDSEEAAARAYDLAALKYWGPETLLNFPVEDYSSEMPEMEAVSREEYLASLRRRSSGFSRGVSKYRGVARHHHNGRWEARIGRVFGNKYLYLGTFDTQEEAAKAYDLAAIEYRGVNAVTNFDISCYLDHPLFLAQLQQEPQVVPALNQEPQPDQSETGTTEQEPESSEAKTPDGSAEPDENAVPDDTAEPLTTVDDSIEEGLWSPCMDYELDTMSRPNFGSSINLSEWFADADFDCNIGCLFDGCSAADEGSKDGVGLADFSLFEAGDVQLKDVLSDMEEGIQPPAMISVCN

SEQ ID NO: 38 - DNA, 1239 bp, Glycine max
atgaagaggtctccagcatcttcttgttcatcatctacttcctctgttgggtttgaagctcccattgaaaaaagaaggcctaagcatccaaggaggaataatttgaagtcacaaaaatgcaagcagaaccaaaccaccactggtggcagaagaagctctatctatagaggagttacaaggcataggtggacagggaggtttgaagctcacctatgggataagagctcttggaacaacattcagagcaagaagggtcgacaagtttatttgggggcatatgatactgaagaatctgcagcccgtacctatgaccttgcagcccttaaatactggggaaaagatgcaaccctgaatttcccgatagaaacttataccaaggagctcgaggaaatggacaaggtttcaagagaagaatatttggcttctttgcggcgccaaagcagtggcttttctagaggcctgtctaagtaccgtggggttgctaggcatcatcataatggtcgctgggaagcacgaattggaagagtatgcggaaacaagtacctctacttggggacatataaaactcaagaggaggcagcagtggcatatgacatggcagcaatagagtaccgtggagtcaatgcagtgaccaattttgacataagcaactacatggacaaaataaagaagaaaaatgaccaaacccaacaacaacaaacagaagcacaaacggaaacagttcctaactcctctgactctgaagaagtagaagtagaacaacagacaacaacaataaccacaccacccccatctgaaaatctgcacatgccaccacagcagcaccaagttcaatacaccccccatgtctctccaagggaagaagaatcatcatcactgatcacaattatggaccatgtgcttgagcaggatctgccatggagcttcatgtacactggcttgtctcagtttcaagatccaaacttggctttctgcaaaggtgatgatgacttggtgggcatgtttgatagtgcagggtttgaggaagacattgattttctgttcagcactcaacctggtgatgagactgagagtgatgtcaacaatatgagcgcagttttggatagtgttgagtgtggagacacaaatggggctggtggaagcatgatgcatgtggataacaagcagaagatagtatcatttgcttcttcaccatcatctacaactacagtttcttgtgactatgctctagatctatga

SEQ ID NO: 39 - protein, 412 aa, Glycine max
MKRSPASSCSSSTSSVGFEAPIEKRRPKHPRRNNLKSQKCKQNQTTTGGRRSSIYRGVTRHRWTGRFEAHLWDKSSWNNIQSKKGRQVYLGAYDTEESAARTYDLAALKYWGKDATLNFPIETYTKELEEMDKVSREEYLASLRRQSSGFSRGLSKYRGVARHHHNGRWEARIGRVCGNKYLYLGTYKTQEEAAVAYDMAAIEYRGVNAVTNFDISNYMDKIKKKNDQTQQQQTEAQTETVPNSSDSEEVEVEQQTTTITTPPPSENLHMPPQQHQVQYTPHVSPREEESSSLITIMDHVLEQDLPWSFMYTGLSQFQDPNLAFCKGDDDLVGMFDSAGFEEDIDFLFSTQPGDETESDVNNMSAVLDSVECGDTNGAGGSMMHVDNKQKIVSFASSPSSTTTVSCDYALDL

SEQ ID NO: 40 - DNA, 1230 bp, Momordica charantia
atgagaaggtctccctctgtttctacttcctcctcctcctcctcctcctgcgtcggcggcggcggcttcgacagcaataatctcaatctcgccgcccctccgcgccggccgcaatcggagaagaccggagcgaaacgccggaagcggaatcaggacgacgccaaatgcgagattgagaatcgtaacggtaataacaacaacagcagcaacaacaatgcctcttccggccgccggagctccatttacagaggagtcactaggcaccgatggaccggccggttcgaagcgcatctctgggacaagagttcgtggaatagcattcagaacaaaaaaggaaggcaagtttatttgggagcatacgataacgaggaagctgccgcccgaacttatgacctcgctgccctcaagtactggggtcccggaaccaccctcaatttcccggtagagtcgtacaggaatgaaatagaagaaatgcggaaagttacgaaggaggagtatttggcgtcgttacggcggcggagcagcggattttcgagaggcgtatcgaagtaccgcggcgtggcccgccaccaccacaacggccggtgggaggcgcggatcggccgtgttttcggaagcaaatatctttacctgggaacttacaacacacaagaggaagcagcagcagcatatgacatggctgcaattgagtacagaggggtcaatgcagtgaccaatttcgacatcagcaattacattgggcggctggagaataaatcatcagtttttccagcagcagagcagcccctacagcccaactgctcccctgcttcctcttctgaggaaggcgaagtagtacagcagcaacagcaacagacgacgatggcgttctcaggctcgcccctccagttcccgtcgatggagaacagcccgacgacaatggaggaggatcatgatctgcattggtcattcctagacacggggttcgtgcaggtccccgacctccccctcgagaagtctggcgaattgcctgacctgttctttgatgagatcgggttcgaggacgacatcgggttgatattcgaggcgagcttggaagacgagaggtgcggggaggggggtgagaagttagaagatgtggggaaaatggagatgatgaagagtgatcatgaggagagggggttgttctcgactacttcgccatcttcgtcgtcgataaccacctcggtttcgtgtgaatttagggtttga

SEQ ID NO: 41 - protein, 409 aa, Momordica charantia
MRRSPSVSTSSSSSSSCVGGGGFDSNNLNLAAPPRRPQSEKTGAKRRKRNQDDAKCEIENRNGNNNNSSNNNASSGRRSSIYRGVTRHRWTGRFEAHLWDKSSWNSIQNKKGRQVYLGAYDNEEAAARTYDLAALKYWGPGTTLNFPVESYRNEIEEMRKVTKEEYLASLRRRSSGFSRGVSKYRGVARHHHNGRWEARIGRVFGSKYLYLGTYNTQEEAAAAYDMAAIEYRGVNAVTNFDISNYIGRLENKSSVFPAAEQPLQPNCSPASSSEEGEVVQQQQQQTTMAFSGSPLQFPSMENSPTTMEEDHDLHWSFLDTGFVQVPDLPLEKSGELPDLFFDEIGFEDDIGLIFEASLEDERCGEGGEKLEDVGKMEMMKSDHEERGLFSTTSPSSSSITTSVSCEFRV

SEQ ID NO: 42 - protein, 430 aa, Arabidopsis thaliana
MKKRLTTSTCSSSPSSSVSSSTTTSSPIQSEAPRPKRAKRAKKSSPSGDKSHNPTSPASTRRSSIYRGVTRHRWTGRFEAHLWDKSSWNSIQNKKGKQVYLGAYDSEEAAAHTYDLAALKYWGPDTILNFPAETYTKELEEMQRVTKEEYLASLRRQSSGFSRGVSKYRGVARHHHNGRWEARIGRVFGNKYLYLGTYNTQEEAAAAYDMAAIEYRGANAVTNFDISNYIDRLKKKGVFPFPVNQANHQEGILVEAKQEVETREAKEEPREEVKQQYVEEPPQEEEEKEEEKAEQQEAEIVGYSEEAAVVNCCIDSSTIMEMDRCGDNNELAWNFCMMDTGFSPFLTDQNLANENPIEYPELFNELAFEDNIDFMFDDGKHECLNLENLDCCVVGRESPPSSSSPLSCLSTDSASSTTTTTTSVSCNYLV

SEQ ID NO: 43 - DNA, 2004 bp, Arabidopsis thaliana
ggtctactctttacatgttctttactccgtctcaaaatttcctttttttgttggctctctccgaacgagttggagaaatcgttaaccctaatcgaagatctagattcctctacatacgtttgatctctctctcagtatggattacaaagcgccaaggagatactactcacacggagttgttgcgagacagcaagatttcgcaacagatatagttacgagaagaagaccttatgtcccttacgaccgtccaaataagttttcaaggagtctggtttggacgtcaaaagagtacaaatcacccgagggcaataatatgccaaggaccaatgatgtgtcaccgaaaccaccagttttaggtttggcgaggaagaatgctgcttgtgggccaatgagatcttctagtctcagaaaatgggtatgtaagtattggaaagatggaaagtgcaagaggggtgagcagtgccagttcttacactcttggtcttgtttccctggattggccatggtagcttctcttgaagggcacaataaggaactaaaggggatcgctctccctgagggttcagataaactcttttcagtcagtattgatggtacattgcgagtttgggactgcaattctggtcagtgtgtacattccatcaaccttgacgcagaagcagggtctctaatcagtgaaggcccttgggttttccttggcttgccaaacgctataaaggcttttaacgttcaaaccagtcaagatttgcatcttcaagcagcaggggtggttggtcaggtgaatgcaatgactattgcaaacggaatgctttttgctggaacaagttctggtagtatcttagtctggaaagctactacagactctgagtctgatccattcaaatacttgacatctcttgagggacatagtggtgaagtcacttgttttgctgttggaggtcaaatgctatactctggttctgtcgataaaacaatcaagatgtgggatctcaacaccctgcaatgtataatgaccctgaagcaacataccggcactgtcacttcactcttatgttgggataaatgtttgatatcgtcttccttggatgggaccataaaagtttgggcttattctgaaaacggaatcttgaaagttgttcaaactcgcagacaagaacagagtagtgttcatgctctttctggtatgcatgatgcagaagccaaaccgataatattctgctcttaccaaaacggaaccgttggcattttcgacctaccatcttttcaagaaagaggaaggatgttctctacgcacacgatcgccacactcacaattggtcctcaaggattgttattcagtggagacgagagtggtaacttgcgtgtatggaccttagctgctggcaacaaagtttagtcttttcgactaaagaattctgatttaattttgtggtttatatgttgagttaactgttaagagagttttattttgtaataggtgtatcagtcaataaacaatctttgtatcaaccaaatgtaatttttctcgttaattcgatttcagagtttttactttaagataaacaaactctttcacacatcatttaatgaaagtggagaagcttaaaaaacaaacaaagaaactgatccatttttggcgggtcttcttctactcttattcatatgtgttaacgaactatagcgtaaaattcagagcaagcgatctccgatttgaacgtggctatcaccggaggcccaccactacgggcgatacgctctaagtgaggattaaagtgctctggtggtgacgttgaagaaactcgcccatggtttttgttatctctgcagccaagtgtcgttctttcttcgccacttctcatcaagctacagtgaatttaaaaatggcgtctttctttgatctcgtatacataagctggattggtttcttaaacaaattcctctccttttgggtcttctgggtttgccttgtaagtgtttgtgtttttgcctctgagaaaaaatcgc

SEQ ID NO: 44 - DNA, 2790 bp, Brassica napus
  misc_feature (2776)..(2776): n is a, c, g, or t
ggccacttctcatcatgttacagggaccataaaaatggcgtatttcttcagccccgggtataaatacacacatgatcctgtggtggtttsttccacaagttacatctccttctggtttttgtattgcaagtgtttgtgttttttgcctccgagagaaaatcatgccgaccggtaggttcgagacgatgcgtgaatgggtccacgacgccatctctgctcaacgcaatgagctcctctctcttttttccagatacgtagctcaggggaaagggatactgyagtcccaccagctgattgacgagttcctcaagactgtgaaagtggatggaactacagaagatcttaagaatcgtcccttcatgaaagttctgcagtctgcagaggaagccatagttttgcctccctttgttgcsctggcgattcgtcccagacctggtgttagagaatatgtccgtgtgaatgtctacgagctgagcgtagaccatttaactgtttctgagtatcttcggttcaaggaagagctcgttaatggccatgccaatgggaattatcttctcgagcttgattttgaaccgttcaacgcaacgtttcctcgtccaactcggtcatcatctattgggaatggggttcagttcctcaaccgtcacctctcgtcaatcatgttccgtaacaaagacagcttggagcctttgcttgagtttctccgcactcacaaacatgacggccgtgccatgatgctgaatgatcgaatacagaacatccgcacacttcaggaagctttggcgagggcagaggagttcctctctaaacttcctttggctacaccatactctgaattcgaatttgractacaagggatgggatttgagaggggatggggtgacacgkcacagaaggtttcagaaatggtgcatctmcttctggacatactccaggcacctgatccttctgtcttggagacgtttcttggaaggattcctatggtgttcaatgtygtkattttgtctccgcatggctactttggccaagccaatgtcttgggtcttcctgatactggtggacaggttgtctacattcttgatcaagtacgtgctttggaaagcgagatgctcctyaggatacagaagcaaggactggatgttactccaaagattctcattgtaacaaggttgataccagaagcagaaggaacaacatgcaaccagaggttagaaaargtwagcggtacagaacacrcacatattctrcgaataccrtttmggactgaaaagggcattcttcgcaagtggatctcgaggtttgatgtctggccatacctggagactttcgcagaggatgcatcaaatgaaattgctgcggagttgcaaggtgtgccaaatctcatcattggcaactacagtgatgggaatctcgtggcttctttgttagcttgtaagctaggcgtgatacagtgcaatattgctcatgctttggagaaaaccaagtatccagagtctgacatttactggagaaaccatgaagataagtatcattttgcaagtcagttcactgcggacctaattgccatgaataatgctgatttcatcatcaccagcacataccaagagatcgctggaagcaaaaacaaagttgggcaatacgaragccacacagctttcacccttcctggtctttacagagttgtkcatggaatcaatgtctttgatcccaagtttaatatagtctctccaggagctgatatgaccatatacttyccwtattctgacaaggaaagaagactaactgcccttcatgagtcwattgaagaactyctgtttagcagygaacagaatgttgagcatgttggttttctkagcgaccagwygaagccaatcattttctccatggccagacttgacagagtgaaaaacttgactgggctagttgagtgctatgccaasaacrgcaasctgagagaggttgcgaacctysttgtastwggtggctacgtggacgtgaatcagtccagggacagagaggaaatggctgagatacaaaagatgcacagcctratcaagcagtatggtttacacggtgagttcaggtggatagctgctcaaatgaaccgtgctmggaacggtgagctttaccgttatatcgcagacacwaaaggtgtttttgttcagcctgctttctatgaagcktttgggctcacagttgtggaatcaatgacttgtgggctcccaacgtttgctacatgtcatggtggacctgcggagatcatcgagaatggagtttctggcttccacatcgacccwtatcatccagaacagsttgcaactactttggtcagcttcttygagacctgcaacgctgatccaagtcactgggagaaaatctctgatggagggcttaagcgaatctatgaaaggtacacatggaagaagtactcagagaggctgcttacgctggctggtgtctattcattctggaaacatgtgtctaagcttgaaaggagagaaacacgacgttacctagagatgttttactctctcaagtatcgtgatctggccaattcaatcccactggcaactgatgagcattgagcaagctatggttggattctaatacttgctgcactccctgttgtgtgtttctgttatctttgaataaataagctattgtcggcttttgtttccatgactagtttggttttcagacttttcctgttgttttcttgatatgaataacaagtatcgttgagttctaagctcggcattaaataacttgtcgtgtnggaaagcttactga

SEQ ID NO: 45 - protein, 807 aa, Brassica napus
  misc_feature (40)..(40): Xaa can be any naturally occurring amino acid
  misc_feature (229)..(229): Xaa can be any naturally occurring amino acid
  misc_feature (243)..(243): Xaa can be any naturally occurring amino acid
  misc_feature (359)..(359): Xaa can be any naturally occurring amino acid
  misc_feature (568)..(568): Xaa can be any naturally occurring amino acid
  misc_feature (593)..(593): Xaa can be any naturally occurring amino acid
  misc_feature (595)..(596): Xaa can be any naturally occurring amino acid
  misc_feature (604)..(604): Xaa can be any naturally occurring amino acid
  misc_feature (606)..(606): Xaa can be any naturally occurring amino acid
  misc_feature (718)..(718): Xaa can be any naturally occurring amino acid
MPTGRFETMREWVHDAISAQRNELLSLFSRYVAQGKGILXSHQLIDEFLKTVKVDGTTEDLKNRPFMKVLQSAEEAIVLPPFVALAIRPRPGVREYVRVNVYELSVDHLTVSEYLRFKEELVNGHANGNYLLELDFEPFNATFPRPTRSSSIGNGVQFLNRHLSSIMFRNKDSLEPLLEFLRTHKHDGRAMMLNDRIQNIRTLQEALARAEEFLSKLPLATPYSEFEFXLQGMGFERGWGDTXQKVSEMVHLLLDILQAPDPSVLETFLGRIPMVFNVVILSPHGYFGQANVLGLPDTGGQVVYILDQVRALESEMLLRIQKQGLDVTPKILIVTRLIPEAEGTTCNQRLEKVSGTEHXHILRIPFRTEKGILRKWISRFDVWPYLETFAEDASNEIAAELQGVPNLIIGNYSDGNLVASLLACKLGVIQCNIAHALEKTKYPESDIYWRNHEDKYHFASQFTADLIAMNNADFIITSTYQEIAGSKNKVGQYESHTAFTLPGLYRVVHGINVFDPKFNIVSPGADMTIYFPYSDKERRLTALHESIEELLFSSEQNVEHVGFLSDQXKPIIFSMARLDRVKNLTGLVECYAXNXXLREVANLXVXGGYVDVNQSRDREEMAEIQKMHSLIKQYGLHGEFRWIAAQMNRARNGELYRYIADTKGVFVQPAFYEAFGLTVVESMTCGLPTFATCHGGPAEIIENGVSGFHIDPYHPEQXATTLVSFFETCNADPSHWEKISDGGLKRIYERYTWKKYSERLLTLAGVYSFWKHVSKLERRETRRYLEMFYSLKYRDLANSIPLATDEH

SEQ ID NO: 46 - DNA, 26 bp, Artificial sequence
  Primer a
ccttgcaaaacttaagatcaaaagtc

SEQ ID NO: 47 - DNA, 26 bp, Artificial sequence
  Primer b
ctatagatgggatgaagctgctctcg

SEQ ID NO: 48 - DNA, 24 bp, Artificial sequence
  Primer c
agagaggagctcattgcgttgagc

SEQ ID NO: 49 - DNA, 24 bp, Artificial sequence
  Primer d
cccattcacgcatcgtctcgaacc

SEQ ID NO: 50 - DNA, 2234 bp, Brassica napus
  misc_feature (859)..(859): n is a, c, g, or t
ctatagatgggatgaagctgctctcgacaaatctgataaaactaaagaaggttagtaatcaatttttacaaaatcatagattatttttttcattgaattatttttatgctataccaagaattgtattttagtatttgttttaactacatataatagaattaactacatataaattaactaaacttaaaataaaaatagatttgtttcctgaaattattttaagaatatatatgtatatatctaaaatcttagacttagatagatttttctatctatctattttggttacttaaaataaataaatttgtataaataattgtatagttatcaaaaattaaaactaatttttttaaagttgttgatatataaaatactaaagatttaacgattaagtatttatttaagtatagaattttgttttttttttaagtttagttatgaagttgttaattatattaaaacaaaacaatatttcgaaattttattatcatattcgaatatattttttttagtgatgatgtatgaattattatcataatttgaaagtttactaaaaaatatatcaacatgaattgtaatatatgagttattaccttaaccaaaattataaattaacattaaatataattatatatgtcatatttagccatacaatgtgtcatcaatattaatagtcatgtcaatattacataatgccaatattatgctacttaaaccccaaatcccctaactcccgttaagtagccaaattcataaatatacttattcgacaaaataaaaaactttaaaatatttactaatccgaccatgcacaagcatccattccctattccattgccacgggataacaatgcaaccnactcctcaaaaaaagaaaaattcaagctcttttgcaaaaaaaaataaaataattttaacacctaaaattttttgtttccaaacttctacagggaacacacataaaagaaaaagaggacgtccactcggatcacgcaacaaaccaaaaggtgtgtcatgactcctaagatataatatttccttattcaaaatcataccattttaaattatgaatgtatttcgtagtccaccagatatgtaatccaccagcgttcaaaccaaagttttatgattgtaagtttaagtgaattataataatatattcttcacggtatcttttcataactaattgagttatcaaacttgatcgcacatgtggctttgataggtgtgacttttatggtatacaattctttcaacctaaaaacattattgttcctcaatatcttacattatgcttgactgcaacaaaatattttctcatctgttttcttcctttaaaccaatttattatcatctatttcctgacattttaatccatccacctatgtcaaaaacttatagaaaatgtcaacttccaaacaaaacataattgaacttcgcaaataaattcttaataatattaaaaaatgttacttaattatttcttcaaccccattttccgcgcgtagcgcggacaaagactctagttaaatatagaagtttccgattctcatcgtataaaacggtgactttggcgggctttcatgtgtaacaaattggtttaacaaaccactgcctagtcgtttagtgtagaatcagcgcatggaactccgattggagcgtgactttcacgtgccggaggcccaccaccacagcgggcgttacgctctaagaatctcgcccacggttttcttcatctgccccccgccaagtgtcttcctcgttcgccacttctcaccaagttacaggaaccctaaaaatggcctttcttcagccccggctataatacacacatgatcctatagtgggttcttccacaagttacatctccttctggattgtacatttcaagtgtttgtgttttttctgcctctgagagaaaatcatgccgacgggtaggttcgagacgatgcgtgaatgggttcacgacgccatctctgctcaacgcaatgagctcctctctctcttttccaggtatctctctctctcttactgaatatgcgttacatatataagttcagtacatgcattgtcactttgtcaactttcaacagttgagagtagagcatgttaaaaaaaaaagttagttcgttttacttgcatgtgtgttgtggttagtctcaggaggagtaatgctttggtttgctatgtttagatacgtagctcaggggaaagggatactgcagtcccaccag

SEQ ID NO: 51 - DNA, 632 bp, Brassica napus
ccaatttattatcatctatttcctgacattttaatccatccacctatgtcaaaaacttatagaaaatgtcaacttccaaacaaaacataattgaacttcgcaaataaattcttaataatattaaaaaatgttacttaattatttcttcaaccccattttccgcgcgtagcgcggacaaagactctagttaaatatagaagtttccgattctcatcgtataaaacggtgactttggcgggctttcatgtgtaacaaattggtttaacaaaccactgcctagtcgtttagtgtagaatcagcgcatggaactccgattggagcgtgactttcacgtrccggaggcccaccaccwcagcgggcgttacgctctaagaatctcgcccacggttttcttcatctcccccccgccaagtgtctccctcgttcgccacttctcatcatgttacagggaccataaaaatggcgtatttcttcagccccgggtataaatacacacatgatcctgtggtgggttcttccacaagttacatctccttctggtttttgtattgcaagtgtttgtattttttgcctccgagagaaaatcatgccgaccggtaggttcgagacgatgcgtgaatgggcctgaattc

SEQ ID NO: 52 - DNA, 35 bp, Artificial sequence
  Primer SA188
ggcgcgccccaatttattatcatctatttcctgac

SEQ ID NO: 53 - DNA, 34 bp, Artificial sequence
  Primer SA189
gcggccgcgattttctctcggaggcaaaaaatac

SEQ ID NO: 54 - DNA, 36 bp, Artificial sequence
  Primer SA190
ggcgcgccctatagatgggatgaagctgctctcgac

SEQ ID NO: 55 - DNA, 36 bp, Artificial sequence
  Primer SA191
gcggccgcgattttctctcagaggcagaaaaaacac

SEQ ID NO: 56 - DNA, 4114 bp, Artificial sequence
  Plasmid BN SUS2 prom1/PCR blunt
cctgaattctgcagatatccatcacactggcggccgctcgagcatgcatctagagggcccaattcgccctatagtgagtcgtattacaattcactggccgtcgttttacaacgtcgtgactgggaaaaccctggcgttacccaacttaatcgccttgcagcacatccccctttcgccagctggcgtaatagcgaagaggcccgcaccgatcgcccttcccaacagttgcgcagcctatacgtacggcagtttaaggtttacacctataaaagagagagccgttatcgtctgtttgtggatgtacagagtgatattattgacacgccggggcgacggatggtgatccccctggccagtgcacgtctgctgtcagataaagtctcccgtgaactttacccggtggtgcatatcggggatgaaagctggcgcatgatgaccaccgatatggccagtgtgccggtctccgttatcggggaagaagtggctgatctcagccaccgcgaaaatgacatcaaaaacgccattaacctgatgttctggggaatataaatgtcaggcatgagattatcaaaaaggatcttcacctagatccttttcacgtagaaagccagtccgcagaaacggtgctgaccccggatgaatgtcagctactgggctatctggacaagggaaaacgcaagcgcaaagagaaagcaggtagcttgcagtgggcttacatggcgatagctagactgggcggttttatggacagcaagcgaaccggaattgccagctggggcgccctctggtaaggttgggaagccctgcaaagtaaactggatggctttcttgccgccaaggatctgatggcgcaggggatcaagctctgatcaagagacaggatgaggatcgtttcgcatgattgaacaagatggattgcacgcaggttctccggccgcttgggtggagaggctattcggctatgactgggcacaacagacaatcggctgctctgatgccgccgtgttccggctgtcagcgcaggggcgcccggttctttttgtcaagaccgacctgtccggtgccctgaatgaactgcaagacgaggcagcgcggctatcgtggctggccacgacgggcgttccttgcgcagctgtgctcgacgttgtcactgaagcgggaagggactggctgctattgggcgaagtgccggggcaggatctcctgtcatctcaccttgctcctgccgagaaagtatccatcatggctgatgcaatgcggcggctgcatacgcttgatccggctacctgcccattcgaccaccaagcgaaacatcgcatcgagcgagcacgtactcggatggaagccggtcttgtcgatcaggatgatctggacgaagagcatcaggggctcgcgccagccgaactgttcgccaggctcaaggcgagcatgcccgacggcgaggatctcgtcgtgacccatggcgatgcctgcttgccgaatatcatggtggaaaatggccgcttttctggattcatcgactgtggccggctgggtgtggcggaccgctatcaggacatagcgttggctacccgtgatattgctgaagagcttggcggcgaatgggctgaccgcttcctcgtgctttacggtatcgccgctcccgattcgcagcgcatcgccttctatcgccttcttgacgagttcttctgaattattaacgcttacaatttcctgatgcggtattttctccttacgcatctgtgcggtatttcacaccgcatcaggtggcacttttcggggaaatgtgcgcggaacccctatttgtttatttttctaaatacattcaaatatgtatccgctcatgagacaataaccctgataaatgcttcaataatagcacgtgaggagggccaccatggccaagttgaccagtgccgttccggtgctcaccgcgcgcgacgtcgccggagcggtcgagttctggaccgaccggctcgggttctcccgggacttcgtggaggacgacttcgccggtgtggtccgggacgacgtgaccctgttcatcagcgcggtccaggaccaggtggtgccggacaacaccctggcctgggtgtgggtgcgcggcctggacgagctgtacgccgagtggtcggaggtcgtgtccacgaacttccgggacgcctccgggccggccatgaccgagatcggcgagcagccgtgggggcgggagttcgccctgcgcgacccggccggcaactgcgtgcacttcgtggccgaggagcaggactgacacgtgctaaaacttcatttttaatttaaaaggatctaggtgaagatcctttttgataatctcatgaccaaaatcccttaacgtgagttttcgttccactgagcgtcagaccccgtagaaaagatcaaaggatcttcttgagatcctttttttctgcgcgtaatctgctgcttgcaaacaaaaaaaccaccgctaccagcggtggtttgtttgccggatcaagagctaccaactctttttccgaaggtaactggcttcagcagagcgcagataccaaatactgttcttctagtgtagccgtagttaggccaccacttcaagaactctgtagcaccgcctacatacctcgctctgctaatcctgttaccagtggctgctgccagtggcgataagtcgtgtcttaccgggttggactcaagacgatagttaccggataaggcgcagcggtcgggctgaacggggggttcgtgcacacagcccagcttggagcgaacgacctacaccgaactgagatacctacagcgtgagctatgagaaagcgccacgcttcccgaagggagaaaggcggacaggtatccggtaagcggcagggtcggaacaggagagcgcacgagggagcttccagggggaaacgcctggtatctttatagtcctgtcgggtttcgccacctctgacttgagcgtcgatttttgtgatgctcgtcaggggggcggagcctatggaaaaacgccagcaacgcggcctttttacggttcctggccttttgctggccttttgctcacatgttctttcctgcgttatcccctgattctgtggataaccgtattaccgcctttgagtgagctgataccgctcgccgcagccgaacgaccgagcgcagcgagtcagtgagcgaggaagcggaagagcgcccaatacgcaaaccgcctctccccgcgcgttggccgattcattaatgcagctggcacgacaggtttcccgactggaaagcgggcagtgagcgcaacgcaattaatgtgagttagctcactcattaggcaccccaggctttacactttatgcttccggctcgtatgttgtgtggaattgtgagcggataacaatttcacacaggaaacagctatgaccatgattacgccaagctatttaggtgacgcgttagaatactcaagctatgcatcaagcttggtaccgagctcggatccactagtaacggccgccagtgtgctggaattcaggggcgcgccccaatttattatcatctatttcctgacattttaatccatccacctatgtcaaaaacttatagaaaatgtcaacttccaaacaaaacataattgaacttcgcaaataaattcttaataatattaaaaaatgttacttaattatttcttcaaccccattttccgcgcgtagcgcggacaaagactctagttaaatatagaagtttccgattctcatcgtataaaacggtgactttggcgggctttcatgtgtaacaaattggtttaacaaaccactgcctagtcgtttagtgtagaatcagcgcatggaactccgattggagcgtgactttcacgtgccggaggcccaccaccacagcgggcgttacgctctaagaatctcgcccacggttttcttcatctcccccccgccaagtgtctccctcgttcgccacttctcatcatgttacagggaccataaaaatggcgtatttcttcagccccgggtataaatacacacatgatcctgtggtgggttcttccacaagttacatctccttctggtttttgtattgcaagtgtttgtattttttgcctccgagagaaaatcgcggccgc

SEQ ID NO: 57 - DNA, 5452 bp, Artificial sequence
  Plasmid BN SUS2 prom2/PCR blunt
  misc_feature (4379)..(4379): n is a, c, g, or t
cctgaattctgcagatatccatcacactggcggccgctcgagcatgcatctagagggcccaattcgccctatagtgagtcgtattacaattcactggccgtcgttttacaacgtcgtgactgggaaaaccctggcgttacccaacttaatcgccttgcagcacatccccctttcgccagctggcgtaatagcgaagaggcccgcaccgatcgcccttcccaacagttgcgcagcctatacgtacggcagtttaaggtttacacctataaaagagagagccgttatcgtctgtttgtggatgtacagagtgatattattgacacgccggggcgacggatggtgatccccctggccagtgcacgtctgctgtcagataaagtctcccgtgaactttacccggtggtgcatatcggggatgaaagctggcgcatgatgaccaccgatatggccagtgtgccggtctccgttatcggggaagaagtggctgatctcagccaccgcgaaaatgacatcaaaaacgccattaacctgatgttctggggaatataaatgtcaggcatgagattatcaaaaaggatcttcacctagatccttttcacgtagaaagccagtccgcagaaacggtgctgaccccggatgaatgtcagctactgggctatctggacaagggaaaacgcaagcgcaaagagaaagcaggtagcttgcagtgggcttacatggcgatagctagactgggcggttttatggacagcaagcgaaccggaattgccagctggggcgccctctggtaaggttgggaagccctgcaaagtaaactggatggctttcttgccgccaaggatctgatggcgcaggggatcaagctctgatcaagagacaggatgaggatcgtttcgcatgattgaacaagatggattgcacgcaggttctccggccgcttgggtggagaggctattcggctatgactgggcacaacagacaatcggctgctctgatgccgccgtgttccggctgtcagcgcaggggcgcccggttctttttgtcaagaccgacctgtccggtgccctgaatgaactgcaagacgaggcagcgcggctatcgtggctggccacgacgggcgttccttgcgcagctgtgctcgacgttgtcactgaagcgggaagggactggctgctattgggcgaagtgccggggcaggatctcctgtcatctcaccttgctcctgccgagaaagtatccatcatggctgatgcaatgcggcggctgcatacgcttgatccggctacctgcccattcgaccaccaagcgaaacatcgcatcgagcgagcacgtactcggatggaagccggtcttgtcgatcaggatgatctggacgaagagcatcaggggctcgcgccagccgaactgttcgccaggctcaaggcgagcatgcccgacggcgaggatctcgtcgtgacccatggcgatgcctgcttgccgaatatcatggtggaaaatggccgcttttctggattcatcgactgtggccggctgggtgtggcggaccgctatcaggacatagcgttggctacccgtgatattgctgaagagcttggcggcgaatgggctgaccgcttcctcgtgctttacggtatcgccgctcccgattcgcagcgcatcgccttctatcgccttcttgacgagttcttctgaattattaacgcttacaatttcctgatgcggtattttctccttacgcatctgtgcggtatttcacaccgcatcaggtggcacttttcggggaaatgtgcgcggaacccctatttgtttatttttctaaatacattcaaatatgtatccgctcatgagacaataaccctgataaatgcttcaataatagcacgtgaggagggccaccatggccaagttgaccagtgccgttccggtgctcaccgcgcgcgacgtcgccggagcggtcgagttctggaccgaccggctcgggttctcccgggacttcgtggaggacgacttcgccggtgtggtccgggacgacgtgaccctgttcatcagcgcggtccaggaccaggtggtgccggacaacaccctggcctgggtgtgggtgcgcggcctggacgagctgtacgccgagtggtcggaggtcgtgtccacgaacttccgggacgcctccgggccggccatgaccgagatcggcgagcagccgtgggggcgggagttcgccctgcgcgacccggccggcaactgcgtgcacttcgtggccgaggagcaggactgacacgtgctaaaacttcatttttaatttaaaaggatctaggtgaagatcctttttgataatctcatgaccaaaatcccttaacgtgagttttcgttccactgagcgtcagaccccgtagaaaagatcaaaggatcttcttgagatcctttttttctgcgcgtaatctgctgcttgcaaacaaaaaaaccaccgctaccagcggtggtttgtttgccggatcaagagctaccaactctttttccgaaggtaactggcttcagcagagcgcagataccaaatactgttcttctagtgtagccgtagttaggccaccacttcaagaactctgtagcaccgcctacatacctcgctctgctaatcctgttaccagtggctgctgccagtggcgataagtcgtgtcttaccgggttggactcaagacgatagttaccggataaggcgcagcggtcgggctgaacggggggttcgtgcacacagcccagcttggagcgaacgacctacaccgaactgagatacctacagcgtgagctatgagaaagcgccacgcttcccgaagggagaaaggcggacaggtatccggtaagcggcagggtcggaacaggagagcgcacgagggagcttccagggggaaacgcctggtatctttatagtcctgtcgggtttcgccacctctgacttgagcgtcgatttttgtgatgctcgtcaggggggcggagcctatggaaaaacgccagcaacgcggcctttttacggttcctggccttttgctggccttttgctcacatgttctttcctgcgttatcccctgattctgtggataaccgtattaccgcctttgagtgagctgataccgctcgccgcagccgaacgaccgagcgcagcgagtcagtgagcgaggaagcggaagagcgcccaatacgcaaaccgcctctccccgcgcgttggccgattcattaatgcagctggcacgacaggtttcccgactggaaagcgggcagtgagcgcaacgcaattaatgtgagttagctcactcattaggcaccccaggctttacactttatgcttccggctcgtatgttgtgtggaattgtgagcggataacaatttcacacaggaaacagctatgaccatgattacgccaagctatttaggtgacgcgttagaatactcaagctatgcatcaagcttggtaccgagctcggatccactagtaacggccgccagtgtgctggaattcaggggcgcgccctatagatgggatgaagctgctctcgacaaatctgataaaactaaagaaggttagtaatcaatttttacaaaatcatagattatttttttcattgaattatttttatgctataccaagaattgtattttagtatttgttttaactacatataatagaattaactacatataaattaactaaacttaaaataaaaatagatttgtttcctgaaattattttaagaatatatatgtatatatctaaaatcttagacttagatagatttttctatctatctattttggttacttaaaataaataaatttgtataaataattgtatagttatcaaaaattaaaactaatttttttaaagttgttgatatataaaatactaaagatttaacgattaagtatttatttaagtatagaattttgttttttttttaagtttagttatgaagttgttaattatattaaaacaaaacaatatttcgaaattttattatcatattcgaatatattttttttagtgatgatgtatgaattattatcataatttgaaagtttactaaaaaatatatcaacatgaattgtaatatatgagttattaccttaaccaaaattataaattaacattaaatataattatatatgtcatatttagccatacaatgtgtcatcaatattaatagtcatgtcaatattacataatgccaatattatgctacttaaaccccaaatcccctaactcccgttaagtagccaaattcataaatatacttattcgacaaaataaaaaactttaaaatatttactaatccgaccatgcacaagcatccattccctattccattgccacgggataacaatgcaaccnactcctcaaaaaaagaaaaattcaagctcttttgcaaaaaaaaataaaataattttaacacctaaaattttttgtttccaaacttctacagggaacacacataaaagaaaaagaggacgtccactcggatcacgcaacaaaccaaaaggtgtgtcatgactcctaagatataatatttccttattcaaaatcataccattttaaattatgaatgtatttcgtagtccaccagatatgtaatccaccagcgttcaaaccaaagttttatgattgtaagtttaagtgaattataataatatattcttcacggtatcttttcataactaattgagttatcaaacttgatcgcacatgtggctttgataggtgtgacttttatggtatacaattctttcaacctaaaaacattattgttcctcaatatcttacattatgcttgactgcaacaaaatattttctcatctgttttcttcctttaaaccaatttattatcatctatttcctgacattttaatccatccacctatgtcaaaaacttatagaaaatgtcaacttccaaacaaaacataattgaacttcgcaaataaattcttaataatattaaaaaatgttacttaattatttcttcaaccccattttccgcgcgtagcgcggacaaagactctagttaaatatagaagtttccgattctcatcgtataaaacggtgactttggcgggctttcatgtgtaacaaattggtttaacaaaccactgcctagtcgtttagtgtagaatcagcgcatggaactccgattggagcgtgactttcacgtgccggaggcccaccaccacagcgggcgttacgctctaagaatctcgcccacggttttcttcatctgccccccgccaagtgtcttcctcgttcgccacttctcaccaagttacaggaaccctaaaaatggcctttcttcagccccggctataatacacacatgatcctatagtgggttcttccacaagttacatctccttctggattgtacatttcaagtgtttgtgttttttctgcctctgagagaaaatcgcggccgc

SEQ ID NO: 58 - DNA, 8227 bp, Artificial sequence
  Vector KS427
  misc_feature (6408)..(6408): n is a, c, g, or t
ctagagggcccaattcgccctatagtgagtcgtattacaattcactggccgtcgttttacaacgtcgtgactgggaaaaccctggcgttacccaacttaatcgccttgcagcacatccccctttcgccagctggcgtaatagcgaagaggcccgcaccgatcgcccttcccaacagttgcgcagcctatacgtacggcagtttaaggtttacacctataaaagagagagccgttatcgtctgtttgtggatgtacagagtgatattattgacacgccggggcgacggatggtgatccccctggccagtgcacgtctgctgtcagataaagtctcccgtgaactttacccggtggtgcatatcggggatgaaagctggcgcatgatgaccaccgatatggccagtgtgccggtctccgttatcggggaagaagtggctgatctcagccaccgcgaaaatgacatcaaaaacgccattaacctgatgttctggggaatataaatgtcaggcatgagattatcaaaaaggatcttcacctagatccttttcacgtagaaagccagtccgcagaaacggtgctgaccccggatgaatgtcagctactgggctatctggacaagggaaaacgcaagcgcaaagagaaagcaggtagcttgcagtgggcttacatggcgatagctagactgggcggttttatggacagcaagcgaaccggaattgccagctggggcgccctctggtaaggttgggaagccctgcaaagtaaactggatggctttcttgccgccaaggatctgatggcgcaggggatcaagctctgatcaagagacaggatgaggatcgtttcgcatgattgaacaagatggattgcacgcaggttctccggccgcttgggtggagaggctattcggctatgactgggcacaacagacaatcggctgctctgatgccgccgtgttccggctgtcagcgcaggggcgcccggttctttttgtcaagaccgacctgtccggtgccctgaatgaactgcaagacgaggcagcgcggctatcgtggctggccacgacgggcgttccttgcgcagctgtgctcgacgttgtcactgaagcgggaagggactggctgctattgggcgaagtgccggggcaggatctcctgtcatctcaccttgctcctgccgagaaagtatccatcatggctgatgcaatgcggcggctgcatacgcttgatccggctacctgcccattcgaccaccaagcgaaacatcgcatcgagcgagcacgtactcggatggaagccggtcttgtcgatcaggatgatctggacgaagagcatcaggggctcgcgccagccgaactgttcgccaggctcaaggcgagcatgcccgacggcgaggatctcgtcgtgacccatggcgatgcctgcttgccgaatatcatggtggaaaatggccgcttttctggattcatcgactgtggccggctgggtgtggcggaccgctatcaggacatagcgttggctacccgtgatattgctgaagagcttggcggcgaatgggctgaccgcttcctcgtgctttacggtatcgccgctcccgattcgcagcgcatcgccttctatcgccttcttgacgagttcttctgaattattaacgcttacaatttcctgatgcggtattttctccttacgcatctgtgcggtatttcacaccgcatcaggtggcacttttcggggaaatgtgcgcggaacccctatttgtttatttttctaaatacattcaaatatgtatccgctcatgagacaataaccctgataaatgcttcaataatagcacgtgaggagggccaccatggccaagttgaccagtgccgttccggtgctcaccgcgcgcgacgtcgccggagcggtcgagttctggaccgaccggctcgggttctcccgggacttcgtggaggacgacttcgccggtgtggtccgggacgacgtgaccctgttcatcagcgcggtccaggaccaggtggtgccggacaacaccctggcctgggtgtgggtgcgcggcctggacgagctgtacgccgagtggtcggaggtcgtgtccacgaacttccgggacgcctccgggccggccatgaccgagatcggcgagcagccgtgggggcgggagttcgccctgcgcgacccggccggcaactgcgtgcacttcgtggccgaggagcaggactgacacgtgctaaaacttcatttttaatttaaaaggatctaggtgaagatcctttttgataatctcatgaccaaaatcccttaacgtgagttttcgttccactgagcgtcagaccccgtagaaaagatcaaaggatcttcttgagatcctttttttctgcgcgtaatctgctgcttgcaaacaaaaaaaccaccgctaccagcggtggtttgtttgccggatcaagagctaccaactctttttccgaaggtaactggcttcagcagagcgcagataccaaatactgttcttctagtgtagccgtagttaggccaccacttcaagaactctgtagcaccgcctacatacctcgctctgctaatcctgttaccagtggctgctgccagtggcgataagtcgtgtcttaccgggttggactcaagacgatagttaccggataaggcgcagcggtcgggctgaacggggggttcgtgcacacagcccagcttggagcgaacgacctacaccgaactgagatacctacagcgtgagctatgagaaagcgccacgcttcccgaagggagaaaggcggacaggtatccggtaagcggcagggtcggaacaggagagcgcacgagggagcttccagggggaaacgcctggtatctttatagtcctgtcgggtttcgccacctctgacttgagcgtcgatttttgtgatgctcgtcaggggggcggagcctatggaaaaacgccagcaacgcggcctttttacggttcctggccttttgctggccttttgctcacatgttctttcctgcgttatcccctgattctgtggataaccgtattaccgcctttgagtgagctgataccgctcgccgcagccgaacgaccgagcgcagcgagtcagtgagcgaggaagcggaagagcgcccaatacgcaaaccgcctctccccgcgcgttggccgattcattaatgcagctggcacgacaggtttcccgactggaaagcgggcagtgagcgcaacgcaattaatgtgagttagctcactcattaggcaccccaggctttacactttatgcttccggctcgtatgttgtgtggaattgtgagcggataacaatttcacacaggaaacagctatgaccatgattacgccaagctatttaggtgacgcgttagaatactcaagctatgcatcaagcttggtaccgagctcggatccactagtaacggccgccagtgtgctggaattcaggggcgcgccccaatttattatcatctatttcctgacattttaatccatccacctatgtcaaaaacttatagaaaatgtcaacttccaaacaaaacataattgaacttcgcaaataaattcttaataatattaaaaaatgttacttaattatttcttcaaccccattttccgcgcgtagcgcggacaaagactctagttaaatatagaagtttccgattctcatcgtataaaacggtgactttggcgggctttcatgtgtaacaaattggtttaacaaaccactgcctagtcgtttagtgtagaatcagcgcatggaactccgattggagcgtgactttcacgtgccggaggcccaccaccacagcgggcgttacgctctaagaatctcgcccacggttttcttcatctcccccccgccaagtgtctccctcgttcgccacttctcatcatgttacagggaccataaaaatggcgtatttcttcagccccgggtataaatacacacatgatcctgtggtgggttcttccacaagttacatctccttctggtttttgtattgcaagtgtttgtattttttgcctccgagagaaaatcgcggccgcaagtatgaactaaaatgcatgtaggtgtaagagctcatggagagcatggaatattgtatccgaccatgtaacagtataataactgagctccatctcacttcttctatgaataaacaaaggatgttatgatatattaacactctatctatgcaccttattgttctatgataaatttcctcttattattataaatcatctgaatcgtgacggcttatggaatgcttcaaatagtacaaaaacaaatgtgtactataagactttctaaacaattctaaccttagcattgtgaacgagacataagtgttaagaagacataacaattataatggaagaagtttgtctccatttatatattatatattacccacttatgtattatattaggatgttaaggagacataacaattataaagagagaagtttgtatccatttatatattatatactacccatttatatattatacttatccacttatttaatgtctttataaggtttgatccatgatatttctaatattttagttgatatgtatatgaaagggtactatttgaactctcttactctgtataaaggttggatcatccttaaagtgggtctatttaattttattgcttcttacagataaaaaaaaaattatgagttggtttgataaaatattgaaggatttaaaataataataaataacatataatatatgtatataaatttattataatataacatttatctataaaaaagtaaatattgtcataaatctatacaatcgtttagccttgctggacgaatctcaattatttaaacgagagtaaacatatttgactttttggttatttaacaaattattatttaacactatatgaaatttttttttttatcagcaaagaataaaattaaattaagaaggacaatggtgtcccaatccttatacaaccaacttccacaagaaagtcaagtcagagacaacaaaaaaacaagcaaaggaaattttttaatttgagttgtcttgtttgctgcataatttatgcagtaaaacactacacataacccttttagcagtagagcaatggttgaccgtgtgcttagcttcttttattttatttttttatcagcaaagaataaataaaataaaatgagacacttcagggatgtttcaacaagcttggatcctcgaagagaagggttaataacacacttttttaacatttttaacacaaattttagttatttaaaaatttattaaaaaatttaaaataagaagaggaactctttaaataaatctaacttacaaaatttatgatttttaataagttttcaccaataaaaaatgtcataaaaatatgttaaaaagtatattatcaatattctctttatgataaataaaaagaaaaaaaaaataaaagttaagtgaaaatgagattgaagtgactttaggtgtgtataaatatatcaaccccgccaacaatttatttaatccaaatatattgaagtatattattccatagcctttatttatttatatatttattatataaaagctttatttgttctaggttgttcatgaaatatttttttggttttatctccgttgtaagaaaatcatgtgctttgtgtcgccactcactattgcagctttttcatgcattggtcagattgacggttgattgtatttttgttttttatggttttgtgttatgacttaagtcttcatctctttatctcttcatcaggtttgatggttacctaatatggtccatgggtacatgcatggttaaattaggtggccaactttgttgtgaacgatagaattttttttatattaagtaaactatttttatattatgaaataataataaaaaaaatattttatcattattaacaaaatcatattagttaatttgttaactctataataaaagaaatactgtaacattcacattacatggtaacatctttccaccctttcatttgttttttgtttgatgactttttttcttgtttaaatttatttcccttcttttaaatttggaatacattatcatcatatataaactaaaatactaaaaacaggattacacaaatgataaataataacacaaatatttataaatctagctgcaatatatttaaactagctatatcgatattgtaaaataaaactagctgcattgatactgataaaaaaatatcatgtgctttctggactgatgatgcagtatacttttgacattgcctttattttatttttcagaaaagctttcttagttctgggttcttcattatttgtttcccatctccattgtgaattgaatcatttgcttcgtgtcacaaatacaatttagntaggtacatgcattggtcagattcacggtttattatgtcatgacttaagttcatggtagtacattacctgccacgcatgcattatattggttagatttgataggcaaatttggttgtcaacaatataaatataaataatgtttttatattacgaaataacagtgatcaaaacaaacagttttatctttattaacaagattttgtttttgtttgatgacgttttttaatgtttacgctttcccccttcttttgaatttagaacactttatcatcataaaatcaaatactaaaaaaattacatatttcataaataataacacaaatatttttaaaaaatctgaaataataatgaacaatattacatattatcacgaaaattcattaataaaaatattatataaataaaatgtaatagtagttatatgtaggaaaaaagtactgcacgcataatatatacaaaaagattaaaatgaactattataaataataacactaaattaatggtgaatcatatcaaaataatgaaaaagtaaataaaatttgtaattaacttctatatgtattacacacacaaataataaataatagtaaaaaaaattatgataaatatttaccatctcataagatatttaaaataatgataaaaatatagattattttttatgcaactagctagccaaaaagagaacacgggtatatataaaaagagtacctttaaattctactgtacttcctttattcctgacgtttttatatcaagtggacatacgtgaagattttaattatcagtctaaatatttcattagcacttaatacttttctgttttattcctatcctataagtagtcccgattctcccaacattgcttattcacacaactaactaagaaagtcttccatagccccccaagcggcccatggcctcctccgaggacgtcatcaaggagttcatgcgcttcaaggtgcgcatggagggctccgtgaacggccacgagttcgagatcgagggcgagggcgagggccgcccctacgagggcacccagaccgccaagctgaaggtgaccaagggcggccccctgcccttcgcctgggacatcctgtccccccagttccagtacggctccaaggtgtacgtgaagcaccccgccgacatccccgactacaagaagctgtccttccccgagggcttcaagtgggagcgcgtgatgaacttcgaggacggcggcgtggtgaccgtgacccaggactcctccctgcaggacggctccttcatctacaaggtgaagttcatcggcgtgaacttcccctccgacggccccgtaatgcagaagaagactatgggctgggaggcctccaccgagcgcctgtacccccgcgacggcgtgctgaagggcgagatccacaaggccctgaagctgaaggacggcggccactacctggtggagttcaagtccatctacatggccaagaagcccgtgcagctgcccggctactactacgtggactccaagctggacatcacctcccacaacgaggactacaccatcgtggagcagtacgagcgcgccgagggccgccaccacctgttcctgtagcggccggccgcgacacaagtgtgagagtactaaataaatgctttggttgtacgaaatcattacactaaataaaataatcaaagcttatatatgccttccgctaaggccgaatgcaaagaaattggttctttctcgttatcttttgccacttttactagtacgtattaattactacttaatcatctttgtttacggctcattatatccgtcgacggcgcgccgct

SEQ ID NO: 59 - DNA, 5704 bp, Artificial sequence
  Vector KS130
ggccgcaagtatgaactaaaatgcatgtaggtgtaagagctcatggagagcatggaatattgtatccgaccatgtaacagtataataactgagctccatctcacttcttctatgaataaacaaaggatgttatgatatattaacactctatctatgcaccttattgttctatgataaatttcctcttattattataaatcatctgaatcgtgacggcttatggaatgcttcaaatagtacaaaaacaaatgtgtactataagactttctaaacaattctaaccttagcattgtgaacgagacataagtgttaagaagacataacaattataatggaagaagtttgtctccatttatatattatatattacccacttatgtattatattaggatgttaaggagacataacaattataaagagagaagtttgtatccatttatatattatatactacccatttatatattatacttatccacttatttaatgtctttataaggtttgatccatgatatttctaatattttagttgatatgtatatgaaagggtactatttgaactctcttactctgtataaaggttggatcatccttaaagtgggtctatttaattttattgcttcttacagataaaaaaaaaattatgagttggtttgataaaatattgaaggatttaaaataataataaataacatataatatatgtatataaatttattataatataacatttatctataaaaaagtaaatattgtcataaatctatacaatcgtttagccttgctggacgaatctcaattatttaaacgagagtaaacatatttgactttttggttatttaacaaattattatttaacactatatgaaatttttttttttatcagcaaagaataaaattaaattaagaaggacaatggtgtcccaatccttatacaaccaacttccacaagaaagtcaagtcagagacaacaaaaaaacaagcaaaggaaattttttaatttgagttgtcttgtttgctgcataatttatgcagtaaaacactacacataacccttttagcagtagagcaatggttgaccgtgtgcttagcttcttttattttatttttttatcagcaaagaataaataaaataaaatgagacacttcagggatgtttcaacaagcttggatccgtcgacggcgcgcccgatcatccggatatagttcctcctttcagcaaaaaacccctcaagacccgtttagaggccccaaggggttatgctagttattgctcagcggtggcagcagccaactcagcttcctttcgggctttgttagcagccggatcgatccaagctgtacctcactattcctttgccctcggacgagtgctggggcgtcggtttccactatcggcgagtacttctacacagccatcggtccagacggccgcgcttctgcgggcgatttgtgtacgcccgacagtcccggctccggatcggacgattgcgtcgcatcgaccctgcgcccaagctgcatcatcgaaattgccgtcaaccaagctctgatagagttggtcaagaccaatgcggagcatatacgcccggagccgcggcgatcctgcaagctccggatgcctccgctcgaagtagcgcgtctgctgctccatacaagccaaccacggcctccagaagaagatgttggcgacctcgtattgggaatccccgaacatcgcctcgctccagtcaatgaccgctgttatgcggccattgtccgtcaggacattgttggagccgaaatccgcgtgcacgaggtgccggacttcggggcagtcctcggcccaaagcatcagctcatcgagagcctgcgcgacggacgcactgacggtgtcgtccatcacagtttgccagtgatacacatggggatcagcaatcgcgcatatgaaatcacgccatgtagtgtattgaccgattccttgcggtccgaatgggccgaacccgctcgtctggctaagatcggccgcagcgatcgcatccatagcctccgcgaccggctgcagaacagcgggcagttcggtttcaggcaggtcttgcaacgtgacaccctgtgcacggcgggagatgcaataggtcaggctctcgctgaattccccaatgtcaagcacttccggaatcgggagcgcggccgatgcaaagtgccgataaacataacgatctttgtagaaaccatcggcgcagctatttacccgcaggacatatccacgccctcctacatcgaagctgaaagcacgagattcttcgccctccgagagctgcatcaggtcggagacgctgtcgaacttttcgatcagaaacttctcgacagacgtcgcggtgagttcaggcttttccatgggtatatctccttcttaaagttaaacaaaattatttctagagggaaaccgttgtggtctccctatagtgagtcgtattaatttcgcgggatcgagatctgatcaacctgcattaatgaatcggccaacgcgcggggagaggcggtttgcgtattgggcgctcttccgcttcctcgctcactgactcgctgcgctcggtcgttcggctgcggcgagcggtatcagctcactcaaaggcggtaatacggttatccacagaatcaggggataacgcaggaaagaacatgtgagcaaaaggccagcaaaaggccaggaaccgtaaaaaggccgcgttgctggcgtttttccataggctccgcccccctgacgagcatcacaaaaatcgacgctcaagtcagaggtggcgaaacccgacaggactataaagataccaggcgtttccccctggaagctccctcgtgcgctctcctgttccgaccctgccgcttaccggatacctgtccgcctttctcccttcgggaagcgtggcgctttctcaatgctcacgctgtaggtatctcagttcggtgtaggtcgttcgctccaagctgggctgtgtgcacgaaccccccgttcagcccgaccgctgcgccttatccggtaactatcgtcttgagtccaacccggtaagacacgacttatcgccactggcagcagccactggtaacaggattagcagagcgaggtatgtaggcggtgctacagagttcttgaagtggtggcctaactacggctacactagaaggacagtatttggtatctgcgctctgctgaagccagttaccttcggaaaaagagttggtagctcttgatccggcaaacaaaccaccgctggtagcggtggtttttttgtttgcaagcagcagattacgcgcagaaaaaaaggatctcaagaagatcctttgatcttttctacggggtctgacgctcagtggaacgaaaactcacgttaagggattttggtcatgacattaacctataaaaataggcgtatcacgaggccctttcgtctcgcgcgtttcggtgatgacggtgaaaacctctgacacatgcagctcccggagacggtcacagcttgtctgtaagcggatgccgggagcagacaagcccgtcagggcgcgtcagcgggtgttggcgggtgtcggggctggcttaactatgcggcatcagagcagattgtactgagagtgcaccatatggacatattgtcgttagaacgcggctacaattaatacataaccttatgtatcatacacatacgatttaggtgacactatagaacggcgcgccaagcttttgatccatgcccttcatttgccgcttattaattaatttggtaacagtccgtactaatcagttacttatccttcccccatcataattaatcttggtagtctcgaatgccacaacactgactagtctcttggatcataagaaaaagccaaggaacaaaagaagacaaaacacaatgagagtatcctttgcatagcaatgtctaagttcataaaattcaaacaaaaacgcaatcacacacagtggacatcacttatccactagctgatcaggatcgccgcgtcaagaaaaaaaaactggaccccaaaagccatgcacaacaacacgtactcacaaaggtgtcaatcgagcagcccaaaacattcaccaactcaacccatcatgagccctcacatttgttgtttctaacccaacctcaaactcgtattctcttccgccacctcatttttgtttatttcaacacccgtcaaactgcatgccaccccgtggccaaatgtccatgcatgttaacaagacctatgactataaatagctgcaatctcggcccaggttttcatcatcaagaaccagttcaatatcctagtacaccgtattaaagaatttaagatatactgcggccgcatggctgctgctcccagtgtgaggacgtttactcgggccgaggttttgaatgccgaggctctgaatgagggcaagaaggatgccgaggcacccttcttgatgatcatcgacaacaaggtgtacgatgtccgcgagttcgtccctgatcatcccggtggaagtgtgattctcacgcacgttggcaaggacggcactgacgtctttgacacttttcaccccgaggctgcttgggagactcttgccaacttttacgttggtgatattgacgagagcgaccgcgatatcaagaatgatgactttgcggccgaggtccgcaagctgcgtaccttgttccagtctcttggttactacgattcttccaaggcatactacgccttcaaggtctcgttcaacctctgcatctggggtttgtcgacggtcattgtggccaagtggggccagacctcgaccctcgccaacgtgctctcggctgcgcttttgggtctgttctggcagcagtgcggatggttggctcacgactttttgcatcaccaggtcttccaggaccgtttctggggtgatcttttcggcgccttcttgggaggtgtctgccagggcttctcgtcctcgtggtggaaggacaagcacaacactcaccacgccgcccccaacgtccacggcgaggatcccgacattgacacccaccctctgttgacctggagtgagcatgcgttggagatgttctcggatgtcccagatgaggagctgacccgcatgtggtcgcgtttcatggtcctgaaccagacctggttttacttccccattctctcgtttgcccgtctctcctggtgcctccagtccattctctttgtgctgcctaacggtcaggcccacaagccctcgggcgcgcgtgtgcccatctcgttggtcgagcagctgtcgcttgcgatgcactggacctggtacctcgccaccatgttcctgttcatcaaggatcccgtcaacatgctggtgtactttttggtgtcgcaggcggtgtgcggaaacttgttggcgatcgtgttctcgctcaaccacaacggtatgcctgtgatctcgaaggaggaggcggtcgatatggatttcttcacgaagcagatcatcacgggtcgtgatgtccacccgggtctatttgccaactggttcacgggtggattgaactatcagatcgagcaccacttgttcccttcgatgcctcgccacaacttttcaaagatccagcctgctgtcgagaccctgtgcaaaaagtacaatgtccgataccacaccaccggtatgatcgagggaactgcagaggtctttagccgtctgaacgaggtctccaaggctgcctccaagatgggtaaggcgcagtaagc

SEQ ID NO: 60 - DNA, 9609 bp, Artificial sequence
  Vector KS432
  misc_feature (2349)..(2349): n is a, c, g, or t
ggccgcaagtatgaactaaaatgcatgtaggtgtaagagctcatggagagcatggaatattgtatccgaccatgtaacagtataataactgagctccatctcacttcttctatgaataaacaaaggatgttatgatatattaacactctatctatgcaccttattgttctatgataaatttcctcttattattataaatcatctgaatcgtgacggcttatggaatgcttcaaatagtacaaaaacaaatgtgtactataagactttctaaacaattctaaccttagcattgtgaacgagacataagtgttaagaagacataacaattataatggaagaagtttgtctccatttatatattatatattacccacttatgtattatattaggatgttaaggagacataacaattataaagagagaagtttgtatccatttatatattatatactacccatttatatattatacttatccacttatttaatgtctttataaggtttgatccatgatatttctaatattttagttgatatgtatatgaaagggtactatttgaactctcttactctgtataaaggttggatcatccttaaagtgggtctatttaattttattgcttcttacagataaaaaaaaaattatgagttggtttgataaaatattgaaggatttaaaataataataaataacatataatatatgtatataaatttattataatataacatttatctataaaaaagtaaatattgtcataaatctatacaatcgtttagccttgctggacgaatctcaattatttaaacgagagtaaacatatttgactttttggttatttaacaaattattatttaacactatatgaaatttttttttttatcagcaaagaataaaattaaattaagaaggacaatggtgtcccaatccttatacaaccaacttccacaagaaagtcaagtcagagacaacaaaaaaacaagcaaaggaaattttttaatttgagttgtcttgtttgctgcataatttatgcagtaaaacactacacataacccttttagcagtagagcaatggttgaccgtgtgcttagcttcttttattttatttttttatcagcaaagaataaataaaataaaatgagacacttcagggatgtttcaacaagcttggatcctcgaagagaagggttaataacacacttttttaacatttttaacacaaattttagttatttaaaaatttattaaaaaatttaaaataagaagaggaactctttaaataaatctaacttacaaaatttatgatttttaataagttttcaccaataaaaaatgtcataaaaatatgttaaaaagtatattatcaatattctctttatgataaataaaaagaaaaaaaaaataaaagttaagtgaaaatgagattgaagtgactttaggtgtgtataaatatatcaaccccgccaacaatttatttaatccaaatatattgaagtatattattccatagcctttatttatttatatatttattatataaaagctttatttgttctaggttgttcatgaaatatttttttggttttatctccgttgtaagaaaatcatgtgctttgtgtcgccactcactattgcagctttttcatgcattggtcagattgacggttgattgtatttttgttttttatggttttgtgttatgacttaagtcttcatctctttatctcttcatcaggtttgatggttacctaatatggtccatgggtacatgcatggttaaattaggtggccaactttgttgtgaacgatagaattttttttatattaagtaaactatttttatattatgaaataataataaaaaaaatattttatcattattaacaaaatcatattagttaatttgttaactctataataaaagaaatactgtaacattcacattacatggtaacatctttccaccctttcatttgttttttgtttgatgactttttttcttgtttaaatttatttcccttcttttaaatttggaatacattatcatcatatataaactaaaatactaaaaacaggattacacaaatgataaataataacacaaatatttataaatctagctgcaatatatttaaactagctatatcgatattgtaaaataaaactagctgcattgatactgataaaaaaatatcatgtgctttctggactgatgatgcagtatacttttgacattgcctttattttatttttcagaaaagctttcttagttctgggttcttcattatttgtttcccatctccattgtgaattgaatcatttgcttcgtgtcacaaatacaatttagntaggtacatgcattggtcagattcacggtttattatgtcatgacttaagttcatggtagtacattacctgccacgcatgcattatattggttagatttgataggcaaatttggttgtcaacaatataaatataaataatgtttttatattacgaaataacagtgatcaaaacaaacagttttatctttattaacaagattttgtttttgtttgatgacgttttttaatgtttacgctttcccccttcttttgaatttagaacactttatcatcataaaatcaaatactaaaaaaattacatatttcataaataataacacaaatatttttaaaaaatctgaaataataatgaacaatattacatattatcacgaaaattcattaataaaaatattatataaataaaatgtaatagtagttatatgtaggaaaaaagtactgcacgcataatatatacaaaaagattaaaatgaactattataaataataacactaaattaatggtgaatcatatcaaaataatgaaaaagtaaataaaatttgtaattaacttctatatgtattacacacacaaataataaataatagtaaaaaaaattatgataaatatttaccatctcataagatatttaaaataatgataaaaatatagattattttttatgcaactagctagccaaaaagagaacacgggtatatataaaaagagtacctttaaattctactgtacttcctttattcctgacgtttttatatcaagtggacatacgtgaagattttaattatcagtctaaatatttcattagcacttaatacttttctgttttattcctatcctataagtagtcccgattctcccaacattgcttattcacacaactaactaagaaagtcttccatagccccccaagcggcccatggcctcctccgaggacgtcatcaaggagttcatgcgcttcaaggtgcgcatggagggctccgtgaacggccacgagttcgagatcgagggcgagggcgagggccgcccctacgagggcacccagaccgccaagctgaaggtgaccaagggcggccccctgcccttcgcctgggacatcctgtccccccagttccagtacggctccaaggtgtacgtgaagcaccccgccgacatccccgactacaagaagctgtccttccccgagggcttcaagtgggagcgcgtgatgaacttcgaggacggcggcgtggtgaccgtgacccaggactcctccctgcaggacggctccttcatctacaaggtgaagttcatcggcgtgaacttcccctccgacggccccgtaatgcagaagaagactatgggctgggaggcctccaccgagcgcctgtacccccgcgacggcgtgctgaagggcgagatccacaaggccctgaagctgaaggacggcggccactacctggtggagttcaagtccatctacatggccaagaagcccgtgcagctgcccggctactactacgtggactccaagctggacatcacctcccacaacgaggactacaccatcgtggagcagtacgagcgcgccgagggccgccaccacctgttcctgtagcggccggccgcgacacaagtgtgagagtactaaataaatgctttggttgtacgaaatcattacactaaataaaataatcaaagcttatatatgccttccgctaaggccgaatgcaaagaaattggttctttctcgttatcttttgccacttttactagtacgtattaattactacttaatcatctttgtttacggctcattatatccgtcgacggcgcgccgctctagagggcccaattcgccctatagtgagtcgtattacaattcactggccgtcgttttacaacgtcgtgactgggaaaaccctggcgttacccaacttaatcgccttgcagcacatccccctttcgccagctggcgtaatagcgaagaggcccgcaccgatcgcccttcccaacagttgcgcagcctatacgtacggcagtttaaggtttacacctataaaagagagagccgttatcgtctgtttgtggatgtacagagtgatattattgacacgccggggcgacggatggtgatccccctggccagtgcacgtctgctgtcagataaagtctcccgtgaactttacccggtggtgcatatcggggatgaaagctggcgcatgatgaccaccgatatggccagtgtgccggtctccgttatcggggaagaagtggctgatctcagccaccgcgaaaatgacatcaaaaacgccattaacctgatgttctggggaatataaatgtcaggcatgagattatcaaaaaggatcttcacctagatccttttcacgtagaaagccagtccgcagaaacggtgctgaccccggatgaatgtcagctactgggctatctggacaagggaaaacgcaagcgcaaagagaaagcaggtagcttgcagtgggcttacatggcgatagctagactgggcggttttatggacagcaagcgaaccggaattgccagctggggcgccctctggtaaggttgggaagccctgcaaagtaaactggatggctttcttgccgccaaggatctgatggcgcaggggatcaagctctgatcaagagacaggatgaggatcgtttcgcatgattgaacaagatggattgcacgcaggttctccggccgcttgggtggagaggctattcggctatgactgggcacaacagacaatcggctgctctgatgccgccgtgttccggctgtcagcgcaggggcgcccggttctttttgtcaagaccgacctgtccggtgccctgaatgaactgcaagacgaggcagcgcggctatcgtggctggccacgacgggcgttccttgcgcagctgtgctcgacgttgtcactgaagcgggaagggactggctgctattgggcgaagtgccggggcaggatctcctgtcatctcaccttgctcctgccgagaaagtatccatcatggctgatgcaatgcggcggctgcatacgcttgatccggctacctgcccattcgaccaccaagcgaaacatcgcatcgagcgagcacgtactcggatggaagccggtcttgtcgatcaggatgatctggacgaagagcatcaggggctcgcgccagccgaactgttcgccaggctcaaggcgagcatgcccgacggcgaggatctcgtcgtgacccatggcgatgcctgcttgccgaatatcatggtggaaaatggccgcttttctggattcatcgactgtggccggctgggtgtggcggaccgctatcaggacatagcgttggctacccgtgatattgctgaagagcttggcggcgaatgggctgaccgcttcctcgtgctttacggtatcgccgctcccgattcgcagcgcatcgccttctatcgccttcttgacgagttcttctgaattattaacgcttacaatttcctgatgcggtattttctccttacgcatctgtgcggtatttcacaccgcatcaggtggcacttttcggggaaatgtgcgcggaacccctatttgtttatttttctaaatacattcaaatatgtatccgctcatgagacaataaccctgataaatgcttcaataatagcacgtgaggagggccaccatggccaagttgaccagtgccgttccggtgctcaccgcgcgcgacgtcgccggagcggtcgagttctggaccgaccggctcgggttctcccgggacttcgtggaggacgacttcgccggtgtggtccgggacgacgtgaccctgttcatcagcgcggtccaggaccaggtggtgccggacaacaccctggcctgggtgtgggtgcgcggcctggacgagctgtacgccgagtggtcggaggtcgtgtccacgaacttccgggacgcctccgggccggccatgaccgagatcggcgagcagccgtgggggcgggagttcgccctgcgcgacccggccggcaactgcgtgcacttcgtggccgaggagcaggactgacacgtgctaaaacttcatttttaatttaaaaggatctaggtgaagatcctttttgataatctcatgaccaaaatcccttaacgtgagttttcgttccactgagcgtcagaccccgtagaaaagatcaaaggatcttcttgagatcctttttttctgcgcgtaatctgctgcttgcaaacaaaaaaaccaccgctaccagcggtggtttgtttgccggatcaagagctaccaactctttttccgaaggtaactggcttcagcagagcgcagataccaaatactgttcttctagtgtagccgtagttaggccaccacttcaagaactctgtagcaccgcctacatacctcgctctgctaatcctgttaccagtggctgctgccagtggcgataagtcgtgtcttaccgggttggactcaagacgatagttaccggataaggcgcagcggtcgggctgaacggggggttcgtgcacacagcccagcttggagcgaacgacctacaccgaactgagatacctacagcgtgagctatgagaaagcgccacgcttcccgaagggagaaaggcggacaggtatccggtaagcggcagggtcggaacaggagagcgcacgagggagcttccagggggaaacgcctggtatctttatagtcctgtcgggtttcgccacctctgacttgagcgtcgatttttgtgatgctcgtcaggggggcggagcctatggaaaaacgccagcaacgcggcctttttacggttcctggccttttgctggccttttgctcacatgttctttcctgcgttatcccctgattctgtggataaccgtattaccgcctttgagtgagctgataccgctcgccgcagccgaacgaccgagcgcagcgagtcagtgagcgaggaagcggaagagcgcccaatacgcaaaccgcctctccccgcgcgttggccgattcattaatgcagctggcacgacaggtttcccgactggaaagcgggcagtgagcgcaacgcaattaatgtgagttagctcactcattaggcaccccaggctttacactttatgcttccggctcgtatgttgtgtggaattgtgagcggataacaatttcacacaggaaacagctatgaccatgattacgccaagctatttaggtgacgcgttagaatactcaagctatgcatcaagcttggtaccgagctcggatccactagtaacggccgccagtgtgctggaattcaggggcgcgccccaatttattatcatctatttcctgacattttaatccatccacctatgtcaaaaacttatagaaaatgtcaacttccaaacaaaacataattgaacttcgcaaataaattcttaataatattaaaaaatgttacttaattatttcttcaaccccattttccgcgcgtagcgcggacaaagactctagttaaatatagaagtttccgattctcatcgtataaaacggtgactttggcgggctttcatgtgtaacaaattggtttaacaaaccactgcctagtcgtttagtgtagaatcagcgcatggaactccgattggagcgtgactttcacgtgccggaggcccaccaccacagcgggcgttacgctctaagaatctcgcccacggttttcttcatctcccccccgccaagtgtctccctcgttcgccacttctcatcatgttacagggaccataaaaatggcgtatttcttcagccccgggtataaatacacacatgatcctgtggtgggttcttccacaagttacatctccttctggtttttgtattgcaagtgtttgtattttttgcctccgagagaaaatcgcggccgcatggctgctgctcccagtgtgaggacgtttactcgggccgaggttttgaatgccgaggctctgaatgagggcaagaaggatgccgaggcacccttcttgatgatcatcgacaacaaggtgtacgatgtccgcgagttcgtccctgatcatcccggtggaagtgtgattctcacgcacgttggcaaggacggcactgacgtctttgacacttttcaccccgaggctgcttgggagactcttgccaacttttacgttggtgatattgacgagagcgaccgcgatatcaagaatgatgactttgcggccgaggtccgcaagctgcgtaccttgttccagtctcttggttactacgattcttccaaggcatactacgccttcaaggtctcgttcaacctctgcatctggggtttgtcgacggtcattgtggccaagtggggccagacctcgaccctcgccaacgtgctctcggctgcgcttttgggtctgttctggcagcagtgcggatggttggctcacgactttttgcatcaccaggtcttccaggaccgtttctggggtgatcttttcggcgccttcttgggaggtgtctgccagggcttctcgtcctcgtggtggaaggacaagcacaacactcaccacgccgcccccaacgtccacggcgaggatcccgacattgacacccaccctctgttgacctggagtgagcatgcgttggagatgttctcggatgtcccagatgaggagctgacccgcatgtggtcgcgtttcatggtcctgaaccagacctggttttacttccccattctctcgtttgcccgtctctcctggtgcctccagtccattctctttgtgctgcctaacggtcaggcccacaagccctcgggcgcgcgtgtgcccatctcgttggtcgagcagctgtcgcttgcgatgcactggacctggtacctcgccaccatgttcctgttcatcaaggatcccgtcaacatgctggtgtactttttggtgtcgcaggcggtgtgcggaaacttgttggcgatcgtgttctcgctcaaccacaacggtatgcctgtgatctcgaaggaggaggcggtcgatatggatttcttcacgaagcagatcatcacgggtcgtgatgtccacccgggtctatttgccaactggttcacgggtggattgaactatcagatcgagcaccacttgttcccttcgatgcctcgccacaacttttcaaagatccagcctgctgtcgagaccctgtgcaaaaagtacaatgtccgataccacaccaccggtatgatcgagggaactgcagaggtctttagccgtctgaacgaggtctccaaggctgcctccaagatgggtaaggcgcagtaagc

SEQ ID NO: 61 - DNA, 19404 bp, Artificial sequence
  Vector ARALO80
  misc_feature (17594)..(17594): n is a, c, g, or t
cgcgcctcgagtgggcggatcccccgggctgcaggaattcactggccgtcgttttacaacgtcgtgactgggaaaaccctggcgttacccaacttaatcgccttgcagcacatccccctttcgccagctggcgtaatagcgaagaggcccgcaccgatcgcccttcccaacagttgcgcagcctgaatggcgaatggatcgatccatcgcgatgtaccttttgttagtcagcctctcgattgctcatcgtcattacacagtaccgaagtttgatcgatctagtaacatagatgacaccgcgcgcgataatttatcctagtttgcgcgctatattttgttttctatcgcgtattaaatgtataattgcgggactctaatcataaaaacccatctcataaataacgtcatgcattacatgttaattattacatgcttaacgtaattcaacagaaattatatgataatcatcgcaagaccggcaacaggattcaatcttaagaaactttattgccaaatgtttgaacgatctgcttcgacgcactccttctttactccaccatctcgtccttattgaaaacgtgggtagcaccaaaacgaatcaagtcgctggaactgaagttaccaatcacgctggatgatttgccagttggattaatcttgcctttccccgcatgaataatattgatgaatgcatgcgtgaggggtagttcgatgttggcaatagctgcaattgccgcgacatcctccaacgagcataattcttcagaaaaatagcgatgttccatgttgtcagggcatgcatgatgcacgttatgaggtgacggtgctaggcagtattccctcaaagtttcatagtcagtatcatattcatcattgcattcctgcaagagagaattgagacgcaatccacacgctgcggcaaccttccggcgttcgtggtctatttgctcttggacgttgcaaacgtaagtgttggatcgatccggggtgggcgaagaactccagcatgagatccccgcgctggaggatcatccagccggcgtcccggaaaacgattccgaagcccaacctttcatagaaggcggcggtggaatcgaaatctcgtgatggcaggttgggcgtcgcttggtcggtcatttcgaaccccagagtcccgctcagaagaactcgtcaagaaggcgatagaaggcgatgcgctgcgaatcgggagcggcgataccgtaaagcacgaggaagcggtcagcccattcgccgccaagctcttcagcaatatcacgggtagccaacgctatgtcctgatagcggtccgccacacccagccggccacagtcgatgaatccagaaaagcggccattttccaccatgatattcggcaagcaggcatcgccatgggtcacgacgagatcctcgccgtcgggcatgcgcgccttgagcctggcgaacagttcggctggcgcgagcccctgatgctcttcgtccagatcatcctgatcgacaagaccggcttccatccgagtacgtgctcgctcgatgcgatgtttcgcttggtggtcgaatgggcaggtagccggatcaagcgtatgcagccgccgcattgcatcagccatgatggatactttctcggcaggagcaaggtgagatgacaggagatcctgccccggcacttcgcccaatagcagccagtcccttcccgcttcagtgacaacgtcgagcacagctgcgcaaggaacgcccgtcgtggccagccacgatagccgcgctgcctcgtcctgcagttcattcagggcaccggacaggtcggtcttgacaaaaagaaccgggcgcccctgcgctgacagccggaacacggcggcatcagagcagccgattgtctgttgtgcccagtcatagccgaatagcctctccacccaagcggccggagaacctgcgtgcaatccatcttgttcaatcatgcgaaacgatccccgcaagcttggagactggtgatttcagcgtgtcctctccaaatgaaatgaacttccttatatagaggaagggtcttgcgaaggatagtgggattgtgcgtcatcccttacgtcagtggagatatcacatcaatccacttgctttgaagacgtggttggaacgtcttctttttccacgatgctcctcgtgggtgggggtccatctttgggaccactgtcggcagaggcatcttcaacgatggcctttcctttatcgcaatgatggcatttgtaggagccaccttccttttccactatcttcacaataaagtgacagatagctgggcaatggaatccgaggaggtttccggatattaccctttgttgaaaagtctcaattgccctttggtcttctgagactgtatctttgatatttttggagtagacaagcgtgtcgtgctccaccatgttgacgaagattttcttcttgtcattgagtcgtaagagactctgtatgaactgttcgccagtctttacggcgagttctgttaggtcctctatttgaatctttgactccatggcctttgattcagtgggaactacctttttagagactccaatctctattacttgccttggtttgtgaagcaagccttgaatcgtccatactggaatagtacttctgatcttgagaaatatatctttctctgtgttcttgatgcagttagtcctgaatcttttgactgcatctttaaccttcttgggaaggtatttgatctcctggagattattgctcgggtagatcgtcttgatgagacctgctgcgtaagcctctctaaccatctgtgggttagcattctttctgaaattgaaaaggctaatcttctcattatcagtggtgaacatggtatcgtcaccttctccgtcgaacttcctgactagatcgtagagatagaggaagtcgtccattgtgatctctggggcaaaggagatctgaattaattcgatatggtggatttatcacaaatgggacccgccgccgacagaggtgtgatgttaggccaggactttgaaaatttgcgcaactatcgtatagtggccgacaaattgacgccgagttgacagactgcctagcatttgagtgaattatgtgaggtaatgggctacactgaattggtagctcaaactgtcagtatttatgtatatgagtgtatattttcgcataatctcagaccaatctgaagatgaaatgggtatctgggaatggcgaaatcaaggcatcgatcgtgaagtttctcatctaagcccccatttggacgtgaatgtagacacgtcgaaataaagatttccgaattagaataatttgtttattgctttcgcctataaatacgacggatcgtaatttgtcgttttatcaaaatgtactttcattttataataacgctgcggacatctacatttttgaattgaaaaaaaattggtaattactctttctttttctccatattgaccatcatactcattgctgatccatgtagatttcccggacatgaagccatttacaattgaatatatcctgccgccgctgccgctttgcacccggtggagcttgcatgttggtttctacgcagaactgagccggttaggcagataatttccattgagaactgagccatgtgcaccttccccccaacacggtgagcgacggggcaacggagtgatccacatgggacttttaaacatcatccgtcggatggcgttgcgagagaagcagtcgatccgtgagatcagccgacgcaccgggcaggcgcgcaacacgatcgcaaagtatttgaacgcaggtacaatcgagccgacgttcacgcggaacgaccaagcaagctagctttaatgcggtagtttatcacagttaaattgctaacgcagtcaggcaccgtgtatgaaatctaacaatgcgctcatcgtcatcctcggcaccgtcaccctggatgctgtaggcataggcttggttatgccggtactgccgggcctcttgcgggatatcgtccattccgacagcatcgccagtcactatggcgtgctgctagcgctatatgcgttgatgcaatttctatgcgcacccgttctcggagcactgtccgaccgctttggccgccgcccagtcctgctcgcttcgctacttggagccactatcgactacgcgatcatggcgaccacacccgtcctgtggtccaacccctccgctgctatagtgcagtcggcttctgacgttcagtgcagccgtcttctgaaaacgacatgtcgcacaagtcctaagttacgcgacaggctgccgccctgcccttttcctggcgttttcttgtcgcgtgttttagtcgcataaagtagaatacttgcgactagaaccggagacattacgccatgaacaagagcgccgccgctggcctgctgggctatgcccgcgtcagcaccgacgaccaggacttgaccaaccaacgggccgaactgcacgcggccggctgcaccaagctgttttccgagaagatcaccggcaccaggcgcgaccgcccggagctggccaggatgcttgaccacctacgccctggcgacgttgtgacagtgaccaggctagaccgcctggcccgcagcacccgcgacctactggacattgccgagcgcatccaggaggccggcgcgggcctgcgtagcctggcagagccgtgggccgacaccaccacgccggccggccgcatggtgttgaccgtgttcgccggcattgccgagttcgagcgttccctaatcatcgaccgcacccggagcgggcgcgaggccgccaaggcccgaggcgtgaagtttggcccccgccctaccctcaccccggcacagatcgcgcacgcccgcgagctgatcgaccaggaaggccgcaccgtgaaagaggcggctgcactgcttggcgtgcatcgctcgaccctgtaccgcgcacttgagcgcagcgaggaagtgacgcccaccgaggccaggcggcgcggtgccttccgtgaggacgcattgaccgaggccgacgccctggcggccgccgagaatgaacgccaagaggaacaagcatgaaaccgcaccaggacggccaggacgaaccgtttttcattaccgaagagatcgaggcggagatgatcgcggccgggtacgtgttcgagccgcccgcgcacgtctcaaccgtgcggctgcatgaaatcctggccggtttgtctgatgccaagctggcggcctggccggccagcttggccgctgaagaaaccgagcgccgccgtctaaaaaggtgatgtgtatttgagtaaaacagcttgcgtcatgcggtcgctgcgtatatgatgcgatgagtaaataaacaaatacgcaagggaacgcatgaagttatcgctgtacttaaccagaaaggcgggtcaggcaagacgaccatcgcaacccatctagcccgcgccctgcaactcgccggggccgatgttctgttagtcgattccgatccccagggcagtgcccgcgattgggcggccgtgcgggaagatcaaccgctaaccgttgtcggcatcgaccgcccgacgattgaccgcgacgtgaaggccatcggccggcgcgacttcgtagtgatcgacggagcgccccaggcggcggacttggctgtgtccgcgatcaaggcagccgacttcgtgctgattccggtgcagccaagcccttacgacatatgggccaccgccgacctggtggagctggttaagcagcgcattgaggtcacggatggaaggctacaagcggcctttgtcgtgtcgcgggcgatcaaaggcacgcgcatcggcggtgaggttgccgaggcgctggccgggtacgagctgcccattcttgagtcccgtatcacgcagcgcgtgagctacccaggcactgccgccgccggcacaaccgttcttgaatcagaacccgagggcgacgctgcccgcgaggtccaggcgctggccgctgaaattaaatcaaaactcatttgagttaatgaggtaaagagaaaatgagcaaaagcacaaacacgctaagtgccggccgtccgagcgcacgcagcagcaaggctgcaacgttggccagcctggcagacacgccagccatgaagcgggtcaactttcagttgccggcggaggatcacaccaagctgaagatgtacgcggtacgccaaggcaagaccattaccgagctgctatctgaatacatcgcgcagctaccagagtaaatgagcaaatgaataaatgagtagatgaattttagcggctaaaggaggcggcatggaaaatcaagaacaaccaggcaccgacgccgtggaatgccccatgtgtggaggaacgggcggttggccaggcgtaagcggctgggttgtctgccggccctgcaatggcactggaacccccaagcccgaggaatcggcgtgagcggtcgcaaaccatccggcccggtacaaatcggcgcggcgctgggtgatgacctggtggagaagttgaaggccgcgcaggccgcccagcggcaacgcatcgaggcagaagcacgccccggtgaatcgtggcaagcggccgctgatcgaatccgcaaagaatcccggcaaccgccggcagccggtgcgccgtcgattaggaagccgcccaagggcgacgagcaaccagattttttcgttccgatgctctatgacgtgggcacccgcgatagtcgcagcatcatggacgtggccgttttccgtctgtcgaagcgtgaccgacgagctggcgaggtgatccgctacgagcttccagacgggcacgtagaggtttccgcagggccggccggcatggccagtgtgtgggattacgacctggtactgatggcggtttcccatctaaccgaatccatgaaccgataccgggaagggaagggagacaagcccggccgcgtgttccgtccacacgttgcggacgtactcaagttctgccggcgagccgatggcggaaagcagaaagacgacctggtagaaacctgcattcggttaaacaccacgcacgttgccatgcagcgtacgaagaaggccaagaacggccgcctggtgacggtatccgagggtgaagccttgattagccgctacaagatcgtaaagagcgaaaccgggcggccggagtacatcgagatcgagctagctgattggatgtaccgcgagatcacagaaggcaagaacccggacgtgctgacggttcaccccgattactttttgatcgatcccggcatcggccgttttctctaccgcctggcacgccgcgccgcaggcaaggcagaagccagatggttgttcaagacgatctacgaacgcagtggcagcgccggagagttcaagaagttctgtttcaccgtgcgcaagctgatcgggtcaaatgacctgccggagtacgatttgaaggaggaggcggggcaggctggcccgatcctagtcatgcgctaccgcaacctgatcgagggcgaagcatccgccggttcctaatgtacggagcagatgctagggcaaattgccctagcaggggaaaaaggtcgaaaaggtctctttcctgtggatagcacgtacattgggaacccaaagccgtacattgggaaccggaacccgtacattgggaacccaaagccgtacattgggaaccggtcacacatgtaagtgactgatataaaagagaaaaaaggcgatttttccgcctaaaactctttaaaacttattaaaactcttaaaacccgcctggcctgtgcataactgtctggccagcgcacagccgaagagctgcaaaaagcgcctacccttcggtcgctgcgctccctacgccccgccgcttcgcgtcggcctatcgcggccgctggccgctcaaaaatggctggcctacggccaggcaatctaccagggcgcggacaagccgcgccgtcgccactcgaccgccggcgcccacatcaaggcaccctgcctcgcgcgtttcggtgatgacggtgaaaacctctgacacatgcagctcccggagacggtcacagcttgtctgtaagcggatgccgggagcagacaagcccgtcagggcgcgtcagcgggtgttggcgggtgtcggggcgcagccatgacccagtcacgtagcgatagcggagtgtatactggcttaactatgcggcatcagagcagattgtactgagagtgcaccatatgcggtgtgaaataccgcacagatgcgtaaggagaaaataccgcatcaggcgctcttccgcttcctcgctcactgactcgctgcgctcggtcgttcggctgcggcgagcggtatcagctcactcaaaggcggtaatacggttatccacagaatcaggggataacgcaggaaagaacatgtgagcaaaaggccagcaaaaggccaggaaccgtaaaaaggccgcgttgctggcgtttttccataggctccgcccccctgacgagcatcacaaaaatcgacgctcaagtcagaggtggcgaaacccgacaggactataaagataccaggcgtttccccctggaagctccctcgtgcgctctcctgttccgaccctgccgcttaccggatacctgtccgcctttctcccttcgggaagcgtggcgctttctcatagctcacgctgtaggtatctcagttcggtgtaggtcgttcgctccaagctgggctgtgtgcacgaaccccccgttcagcccgaccgctgcgccttatccggtaactatcgtcttgagtccaacccggtaagacacgacttatcgccactggcagcagccactggtaacaggattagcagagcgaggtatgtaggcggtgctacagagttcttgaagtggtggcctaactacggctacactagaaggacagtatttggtatctgcgctctgctgaagccagttaccttcggaaaaagagttggtagctcttgatccggcaaacaaaccaccgctggtagcggtggtttttttgtttgcaagcagcagattacgcgcagaaaaaaaggatctcaagaagatcctttgatcttttctacggggtctgacgctcagtggaacgaaaactcacgttaagggattttggtcatgagattatcaaaaaggatcttcacctagatccttttaaattaaaaatgaagttttaaatcaatctaaagtatatatgagtaaacttggtctgacagttaccaatgcttaatcagtgaggcacctatctcagcgatctgtctatttcgttcatccatagttgcctgactccccgtcgtgtagataactacgatacgggagggcttaccatctggccccagtgctgcaatgataccgcgagacccacgctcaccggctccagatttatcagcaataaaccagccagccggaagggccgagcgcagaagtggtcctgcaactttatccgcctccatccagtctattaattgttgccgggaagctagagtaagtagttcgccagttaatagtttgcgcaacgttgttgccattgctacaggcatcgtggtgtcacgctcgtcgtttggtatggcttcattcagctccggttcccaacgatcaaggcgagttacatgatcccccatgttgtgcaaaaaagcggttagctccttcggtcctccgatcgttgtcagaagtaagttggccgcagtgttatcactcatggttatggcagcactgcataattctcttactgtcatgccatccgtaagatgcttttctgtgactggtgagtactcaaccaagtcattctgagaatagtgtatgcggcgaccgagttgctcttgcccggcgtcaacacgggataataccgcgccacatagcagaactttaaaagtgctcatcattggaaaagacctgcaggggggggggggcgctgaggtctgcctcgtgaagaaggtgttgctgactcataccaggcctgaatcgccccatcatccagccagaaagtgagggagccacggttgatgagagctttgttgtaggtggaccagttggtgattttgaacttttgctttgccacggaacggtctgcgttgtcgggaagatgcgtgatctgatccttcaactcagcaaaagttcgatttattcaacaaagccgccgtcccgtcaagtcagcgtaatgctctgccagtgttacaaccaattaaccaattctgattagaaaaactcatcgagcatcaaatgaaactgcaatttattcatatcaggattatcaataccatatttttgaaaaagccgtttctgtaatgaaggagaaaactcaccgaggcagttccataggatggcaagatcctggtatcggtctgcgattccgactcgtccaacatcaatacaacctattaatttcccctcgtcaaaaataaggttatcaagtgagaaatcaccatgagtgacgactgaatccggtgagaatggcaaaagcttatgcatttctttccagacttgttcaacaggccagccattacgctcgtcatcaaaatcactcgcatcaaccaaaccgttattcattcgtgattgcgcctgagcgagacgaaatacgcgatcgctgttaaaaggacaattacaaacaggaatcgaatgcaaccggcgcaggaacactgccagcgcatcaacaatattttcacctgaatcaggatattcttctaatacctggaatgctgttttcccggggatcgcagtggtgagtaaccatgcatcatcaggagtacggataaaatgcttgatggtcggaagaggcataaattccgtcagccagtttagtctgaccatctcatctgtaacatcattggcaacgctacctttgccatgtttcagaaacaactctggcgcatcgggcttcccatacaatcgatagattgtcgcacctgattgcccgacattatcgcgagcccatttatacccatataaatcagcatccatgttggaatttaatcgcggcctcgagcaagacgtttcccgttgaatatggctcataacaccccttgtattactgtttatgtaagcagacagttttattgttcatgatgatatatttttatcttgtgcaatgtaacatcagagattttgagacacaacgtggctttcccccccccccctgcaggtcaattcggtcgatatggctattacgaagaaggctcgtgcgcggagtcccgtgaactttcccacgcaacaagtgaaccgcaccgggtttgccggaggccatttcgttaaaatgcgcagccatggctgcttcgtccagcatggcgtaatactgatcctcgtcttcggctggcggtatattgccgatgggcttcaaaagccgccgtggttgaaccagtctatccattccaaggtagcgaactcgaccgcttcgaagctcctccatggtccacgccgatgaatgacctcggccttgtaaagaccgttgatcgcttctgcgagggcgttgtcgtgctgtcgccgacgcttccgatagatggctcgatacctgcttctgccaaccgctcggaatagcgaaaggacacgtattgaacaccgcgatccgagtgatgcactaggccgccatgagcgggacgccgatcatgatgagcctcctcgagggcatcgaggacaaagcctgcatgtgctgtccggctcgcccgccatccgacaatgcgacgggcgaagacgtcgatcacgaaggccacgtagacgaagccctcccaagtggcgacataagtacggacatgcgcaaaggctttcccggtttgtcgctgatggtgcaagagacgctgaagcgcgatccgatgcgcaggcatctgttcgtcttccgcggtcgtggcggtggcctgatcaaggtcactcgccgaagagctgcatgattggctcgaaaccgagcgggggaaattgtcgcgcagttctcccgtcgccgaggcgataaattacatgctcaagcgatgggatggcattacgtcattcctcgatgacggcccgatttgcctgacgaacaatgctgccgaacgaacgctcagaggctatgtactcggcaggaagtcatggctgtttgccggatcggatcgttgtgctgaacgtgcggcgttcatggcgacactgatcatgagcgccaagctcaataacatcgatccgcaggcctggcttgccgacgtccgcgccgaccttgcggacgctccgatcagcaggcttgagcaacagctgccgtggaactggacatccaagacactgagtgctcaggcggcctgacctgcggccttcaccggatacttaccccattatcgcagattgcgatgaagcatcagcgtcattcagcaatcttgccaaagtatgcaggctcgcgagaatcgacgtgcgaaaccggctggttgcgccaaagatccgcttgcggagcggtcgaacattcatgctgggacttcaagaggtcgagtagaggaagaaccggaaaggttgcaccggaaaatatgcgttcctttggagagcgcctcatggacgtgaacaaatcgcccggaccaaggatgccacggatacaaaagctcgcgaagctcggtcccgtgggtgttctgtcgtctcgttgtacaacgaaatccattcccattccgcgctcaagatggcttcccctcggcagttcatcagggctaaatcaatctagccgacttgtccggtgaaatgggctgcactccaacagaaacaatcaaacaaacatacacagcgacttattcacacgagctcaaattacaacggtatatatcctgccagtcagcatcatcacaccaaaagttaggcccgaatagtttgaaattagaaagctcgcaattgaggtctacaggccaaattcgctcttagccgtacaatattactcaccggtgcgatgccccccatcgtaggtgaaggtggaaattaatgatccatcttgagaccacaggcccacaacagctaccagtttcctcaagggtccaccaaaaacgtaagcgcttacgtacatggtcgataagaaaaggcaatttgtagatgttaacatccaacgtcgctttcagggatcgatccaatacgcaaaccgcctctccccgcgcgttggccgattcattaatgcagctggcacgacaggtttcccgactggaaagcgggcagtgagcgcaacgcaattaatgtgagttagctcactcattaggcaccccaggctttacactttatgcttccggctcgtatgttgtgtggaattgtgagcggataacaatttcacacaggaaacagctatgaccatgattacgccaagcttgcatgcctgcaggtcgactctagaggatctggcgcgccccaatttattatcatctatttcctgacattttaatccatccacctatgtcaaaaacttatagaaaatgtcaacttccaaacaaaacataattgaacttcgcaaataaattcttaataatattaaaaaatgttacttaattatttcttcaaccccattttccgcgcgtagcgcggacaaagactctagttaaatatagaagtttccgattctcatcgtataaaacggtgactttggcgggctttcatgtgtaacaaattggtttaacaaaccactgcctagtcgtttagtgtagaatcagcgcatggaactccgattggagcgtgactttcacgtgccggaggcccaccaccacagcgggcgttacgctctaagaatctcgcccacggttttcttcatctcccccccgccaagtgtctccctcgttcgccacttctcatcatgttacagggaccataaaaatggcgtatttcttcagccccgggtataaatacacacatgatcctgtggtgggttcttccacaagttacatctccttctggtttttgtattgcaagtgtttgtattttttgcctccgagagaaaatcgcggccgcatggctgctgctcccagtgtgaggacgtttactcgggccgaggttttgaatgccgaggctctgaatgagggcaagaaggatgccgaggcacccttcttgatgatcatcgacaacaaggtgtacgatgtccgcgagttcgtccctgatcatcccggtggaagtgtgattctcacgcacgttggcaaggacggcactgacgtctttgacacttttcaccccgaggctgcttgggagactcttgccaacttttacgttggtgatattgacgagagcgaccgcgatatcaagaatgatgactttgcggccgaggtccgcaagctgcgtaccttgttccagtctcttggttactacgattcttccaaggcatactacgccttcaaggtctcgttcaacctctgcatctggggtttgtcgacggtcattgtggccaagtggggccagacctcgaccctcgccaacgtgctctcggctgcgcttttgggtctgttctggcagcagtgcggatggttggctcacgactttttgcatcaccaggtcttccaggaccgtttctggggtgatcttttcggcgccttcttgggaggtgtctgccagggcttctcgtcctcgtggtggaaggacaagcacaacactcaccacgccgcccccaacgtccacggcgaggatcccgacattgacacccaccctctgttgacctggagtgagcatgcgttggagatgttctcggatgtcccagatgaggagctgacccgcatgtggtcgcgtttcatggtcctgaaccagacctggttttacttccccattctctcgtttgcccgtctctcctggtgcctccagtccattctctttgtgctgcctaacggtcaggcccacaagccctcgggcgcgcgtgtgcccatctcgttggtcgagcagctgtcgcttgcgatgcactggacctggtacctcgccaccatgttcctgttcatcaaggatcccgtcaacatgctggtgtactttttggtgtcgcaggcggtgtgcggaaacttgttggcgatcgtgttctcgctcaaccacaacggtatgcctgtgatctcgaaggaggaggcggtcgatatggatttcttcacgaagcagatcatcacgggtcgtgatgtccacccgggtctatttgccaactggttcacgggtggattgaactatcagatcgagcaccacttgttcccttcgatgcctcgccacaacttttcaaagatccagcctgctgtcgagaccctgtgcaaaaagtacaatgtccgataccacaccaccggtatgatcgagggaactgcagaggtctttagccgtctgaacgaggtctccaaggctgcctccaagatgggtaaggcgcagtaagcggccgcaagtatgaactaaaatgcatgtaggtgtaagagctcatggagagcatggaatattgtatccgaccatgtaacagtataataactgagctccatctcacttcttctatgaataaacaaaggatgttatgatatattaacactctatctatgcaccttattgttctatgataaatttcctcttattattataaatcatctgaatcgtgacggcttatggaatgcttcaaatagtacaaaaacaaatgtgtactataagactttctaaacaattctaaccttagcattgtgaacgagacataagtgttaagaagacataacaattataatggaagaagtttgtctccatttatatattatatattacccacttatgtattatattaggatgttaaggagacataacaattataaagagagaagtttgtatccatttatatattatatactacccatttatatattatacttatccacttatttaatgtctttataaggtttgatccatgatatttctaatattttagttgatatgtatatgaaagggtactatttgaactctcttactctgtataaaggttggatcatccttaaagtgggtctatttaattttattgcttcttacagataaaaaaaaaattatgagttggtttgataaaatattgaaggatttaaaataataataaataacatataatatatgtatataaatttattataatataacatttatctataaaaaagtaaatattgtcataaatctatacaatcgtttagccttgctggacgaatctcaattatttaaacgagagtaaacatatttgactttttggttatttaacaaattattatttaacactatatgaaatttttttttttatcagcaaagaataaaattaaattaagaaggacaatggtgtcccaatccttatacaaccaacttccacaagaaagtcaagtcagagacaacaaaaaaacaagcaaaggaaattttttaatttgagttgtcttgtttgctgcataatttatgcagtaaaacactacacataacccttttagcagtagagcaatggttgaccgtgtgcttagcttcttttattttatttttttatcagcaaagaataaataaaataaaatgagacacttcagggatgtttcaacaagcttggatcctcgaagagaagggttaataacacacttttttaacatttttaacacaaattttagttatttaaaaatttattaaaaaatttaaaataagaagaggaactctttaaataaatctaacttacaaaatttatgatttttaataagttttcaccaataaaaaatgtcataaaaatatgttaaaaagtatattatcaatattctctttatgataaataaaaagaaaaaaaaaataaaagttaagtgaaaatgagattgaagtgactttaggtgtgtataaatatatcaaccccgccaacaatttatttaatccaaatatattgaagtatattattccatagcctttatttatttatatatttattatataaaagctttatttgttctaggttgttcatgaaatatttttttggttttatctccgttgtaagaaaatcatgtgctttgtgtcgccactcactattgcagctttttcatgcattggtcagattgacggttgattgtatttttgttttttatggttttgtgttatgacttaagtcttcatctctttatctcttcatcaggtttgatggttacctaatatggtccatgggtacatgcatggttaaattaggtggccaactttgttgtgaacgatagaattttttttatattaagtaaactatttttatattatgaaataataataaaaaaaatattttatcattattaacaaaatcatattagttaatttgttaactctataataaaagaaatactgtaacattcacattacatggtaacatctttccaccctttcatttgttttttgtttgatgactttttttcttgtttaaatttatttcccttcttttaaatttggaatacattatcatcatatataaactaaaatactaaaaacaggattacacaaatgataaataataacacaaatatttataaatctagctgcaatatatttaaactagctatatcgatattgtaaaataaaactagctgcattgatactgataaaaaaatatcatgtgctttctggactgatgatgcagtatacttttgacattgcctttattttatttttcagaaaagctttcttagttctgggttcttcattatttgtttcccatctccattgtgaattgaatcatttgcttcgtgtcacaaatacaatttagntaggtacatgcattggtcagattcacggtttattatgtcatgacttaagttcatggtagtacattacctgccacgcatgcattatattggttagatttgataggcaaatttggttgtcaacaatataaatataaataatgtttttatattacgaaataacagtgatcaaaacaaacagttttatctttattaacaagattttgtttttgtttgatgacgttttttaatgtttacgctttcccccttcttttgaatttagaacactttatcatcataaaatcaaatactaaaaaaattacatatttcataaataataacacaaatatttttaaaaaatctgaaataataatgaacaatattacatattatcacgaaaattcattaataaaaatattatataaataaaatgtaatagtagttatatgtaggaaaaaagtactgcacgcataatatatacaaaaagattaaaatgaactattataaataataacactaaattaatggtgaatcatatcaaaataatgaaaaagtaaataaaatttgtaattaacttctatatgtattacacacacaaataataaataatagtaaaaaaaattatgataaatatttaccatctcataagatatttaaaataatgataaaaatatagattattttttatgcaactagctagccaaaaagagaacacgggtatatataaaaagagtacctttaaattctactgtacttcctttattcctgacgtttttatatcaagtggacatacgtgaagattttaattatcagtctaaatatttcattagcacttaatacttttctgttttattcctatcctataagtagtcccgattctcccaacattgcttattcacacaactaactaagaaagtcttccatagccccccaagcggcccatggcctcctccgaggacgtcatcaaggagttcatgcgcttcaaggtgcgcatggagggctccgtgaacggccacgagttcgagatcgagggcgagggcgagggccgcccctacgagggcacccagaccgccaagctgaaggtgaccaagggcggccccctgcccttcgcctgggacatcctgtccccccagttccagtacggctccaaggtgtacgtgaagcaccccgccgacatccccgactacaagaagctgtccttccccgagggcttcaagtgggagcgcgtgatgaacttcgaggacggcggcgtggtgaccgtgacccaggactcctccctgcaggacggctccttcatctacaaggtgaagttcatcggcgtgaacttcccctccgacggccccgtaatgcagaagaagactatgggctgggaggcctccaccgagcgcctgtacccccgcgacggcgtgctgaagggcgagatccacaaggccctgaagctgaaggacggcggccactacctggtggagttcaagtccatctacatggccaagaagcccgtgcagctgcccggctactactacgtggactccaagctggacatcacctcccacaacgaggactacaccatcgtggagcagtacgagcgcgccgagggccgccaccacctgttcctgtagcggccggccgcgacacaagtgtgagagtactaaataaatgctttggttgtacgaaatcattacactaaataaaataatcaaagcttatatatgccttccgctaaggccgaatgcaaagaaattggttctttctcgttatcttttgccacttttactagtacgtattaattactacttaatcatctttgtttacggctcattatatccgtcgacgg

SEQ ID NO: 62 - DNA, 30 bp, Artificial sequence
  Primer D6 fwd
gaattcgcggccgcatggctgctgctccca

SEQ ID NO: 63 - DNA, 30 bp, Artificial sequence
  Primer D6 rev
gaattcgcggccgcttactgcgccttaccc

SEQ ID NO: 64 - DNA, 4322 bp, Artificial sequence
  Vector KS119
agcttttgatccatgcccttcatttgccgcttattaattaatttggtaacagtccgtactaatcagttacttatccttcccccatcataattaatcttggtagtctcgaatgccacaacactgactagtctcttggatcataagaaaaagccaaggaacaaaagaagacaaaacacaatgagagtatcctttgcatagcaatgtctaagttcataaaattcaaacaaaaacgcaatcacacacagtggacatcacttatccactagctgatcaggatcgccgcgtcaagaaaaaaaaactggaccccaaaagccatgcacaacaacacgtactcacaaaggtgtcaatcgagcagcccaaaacattcaccaactcaacccatcatgagccctcacatttgttgtttctaacccaacctcaaactcgtattctcttccgccacctcatttttgtttatttcaacacccgtcaaactgcatgccaccccgtggccaaatgtccatgcatgttaacaagacctatgactataaatagctgcaatctcggcccaggttttcatcatcaagaaccagttcaatatcctagtacaccgtattaaagaatttaagatatactgcggccgcaagtatgaactaaaatgcatgtaggtgtaagagctcatggagagcatggaatattgtatccgaccatgtaacagtataataactgagctccatctcacttcttctatgaataaacaaaggatgttatgatatattaacactctatctatgcaccttattgttctatgataaatttcctcttattattataaatcatctgaatcgtgacggcttatggaatgcttcaaatagtacaaaaacaaatgtgtactataagactttctaaacaattctaaccttagcattgtgaacgagacataagtgttaagaagacataacaattataatggaagaagtttgtctccatttatatattatatattacccacttatgtattatattaggatgttaaggagacataacaattataaagagagaagtttgtatccatttatatattatatactacccatttatatattatacttatccacttatttaatgtctttataaggtttgatccatgatatttctaatattttagttgatatgtatatgaaagggtactatttgaactctcttactctgtataaaggttggatcatccttaaagtgggtctatttaattttattgcttcttacagataaaaaaaaaattatgagttggtttgataaaatattgaaggatttaaaataataataaataacatataatatatgtatataaatttattataatataacatttatctataaaaaagtaaatattgtcataaatctatacaatcgtttagccttgctggacgaatctcaattatttaaacgagagtaaacatatttgactttttggttatttaacaaattattatttaacactatatgaaatttttttttttatcagcaaagaataaaattaaattaagaaggacaatggtgtcccaatccttatacaaccaacttccacaagaaagtcaagtcagagacaacaaaaaaacaagcaaaggaaattttttaatttgagttgtcttgtttgctgcataatttatgcagtaaaacactacacataacccttttagcagtagagcaatggttgaccgtgtgcttagcttcttttattttatttttttatcagcaaagaataaataaaataaaatgagacacttcagggatgtttcaacaagcttggatccgtcgacggcgcgcccgatcatccggatatagttcctcctttcagcaaaaaacccctcaagacccgtttagaggccccaaggggttatgctagttattgctcagcggtggcagcagccaactcagcttcctttcgggctttgttagcagccggatcgatccaagctgtacctcactattcctttgccctcggacgagtgctggggcgtcggtttccactatcggcgagtacttctacacagccatcggtccagacggccgcgcttctgcgggcgatttgtgtacgcccgacagtcccggctccggatcggacgattgcgtcgcatcgaccctgcgcccaagctgcatcatcgaaattgccgtcaaccaagctctgatagagttggtcaagaccaatgcggagcatatacgcccggagccgcggcgatcctgcaagctccggatgcctccgctcgaagtagcgcgtctgctgctccatacaagccaaccacggcctccagaagaagatgttggcgacctcgtattgggaatccccgaacatcgcctcgctccagtcaatgaccgctgttatgcggccattgtccgtcaggacattgttggagccgaaatccgcgtgcacgaggtgccggacttcggggcagtcctcggcccaaagcatcagctcatcgagagcctgcgcgacggacgcactgacggtgtcgtccatcacagtttgccagtgatacacatggggatcagcaatcgcgcatatgaaatcacgccatgtagtgtattgaccgattccttgcggtccgaatgggccgaacccgctcgtctggctaagatcggccgcagcgatcgcatccatagcctccgcgaccggctgcagaacagcgggcagttcggtttcaggcaggtcttgcaacgtgacaccctgtgcacggcgggagatgcaataggtcaggctctcgctgaattccccaatgtcaagcacttccggaatcgggagcgcggccgatgcaaagtgccgataaacataacgatctttgtagaaaccatcggcgcagctatttacccgcaggacatatccacgccctcctacatcgaagctgaaagcacgagattcttcgccctccgagagctgcatcaggtcggagacgctgtcgaacttttcgatcagaaacttctcgacagacgtcgcggtgagttcaggcttttccatgggtatatctccttcttaaagttaaacaaaattatttctagagggaaaccgttgtggtctccctatagtgagtcgtattaatttcgcgggatcgagatctgatcaacctgcattaatgaatcggccaacgcgcggggagaggcggtttgcgtattgggcgctcttccgcttcctcgctcactgactcgctgcgctcggtcgttcggctgcggcgagcggtatcagctcactcaaaggcggtaatacggttatccacagaatcaggggataacgcaggaaagaacatgtgagcaaaaggccagcaaaaggccaggaaccgtaaaaaggccgcgttgctggcgtttttccataggctccgcccccctgacgagcatcacaaaaatcgacgctcaagtcagaggtggcgaaacccgacaggactataaagataccaggcgtttccccctggaagctccctcgtgcgctctcctgttccgaccctgccgcttaccggatacctgtccgcctttctcccttcgggaagcgtggcgctttctcaatgctcacgctgtaggtatctcagttcggtgtaggtcgttcgctccaagctgggctgtgtgcacgaaccccccgttcagcccgaccgctgcgccttatccggtaactatcgtcttgagtccaacccggtaagacacgacttatcgccactggcagcagccactggtaacaggattagcagagcgaggtatgtaggcggtgctacagagttcttgaagtggtggcctaactacggctacactagaaggacagtatttggtatctgcgctctgctgaagccagttaccttcggaaaaagagttggtagctcttgatccggcaaacaaaccaccgctggtagcggtggtttttttgtttgcaagcagcagattacgcgcagaaaaaaaggatctcaagaagatcctttgatcttttctacggggtctgacgctcagtggaacgaaaactcacgttaagggattttggtcatgacattaacctataaaaataggcgtatcacgaggccctttcgtctcgcgcgtttcggtgatgacggtgaaaacctctgacacatgcagctcccggagacggtcacagcttgtctgtaagcggatgccgggagcagacaagcccgtcagggcgcgtcagcgggtgttggcgggtgtcggggctggcttaactatgcggcatcagagcagattgtactgagagtgcaccatatggacatattgtcgttagaacgcggctacaattaatacataaccttatgtatcatacacatacgatttaggtgacactatagaacggcgcgcca

SEQ ID NO: 65 - DNA, 9420 bp, Artificial sequence
  Vector KS430
  misc_feature (2349)..(2349): n is a, c, g, or t
ggccgcaagtatgaactaaaatgcatgtaggtgtaagagctcatggagagcatggaatattgtatccgaccatgtaacagtataataactgagctccatctcacttcttctatgaataaacaaaggatgttatgatatattaacactctatctatgcaccttattgttctatgataaatttcctcttattattataaatcatctgaatcgtgacggcttatggaatgcttcaaatagtacaaaaacaaatgtgtactataagactttctaaacaattctaaccttagcattgtgaacgagacataagtgttaagaagacataacaattataatggaagaagtttgtctccatttatatattatatattacccacttatgtattatattaggatgttaaggagacataacaattataaagagagaagtttgtatccatttatatattatatactacccatttatatattatacttatccacttatttaatgtctttataaggtttgatccatgatatttctaatattttagttgatatgtatatgaaagggtactatttgaactctcttactctgtataaaggttggatcatccttaaagtgggtctatttaattttattgcttcttacagataaaaaaaaaattatgagttggtttgataaaatattgaaggatttaaaataataataaataacatataatatatgtatataaatttattataatataacatttatctataaaaaagtaaatattgtcataaatctatacaatcgtttagccttgctggacgaatctcaattatttaaacgagagtaaacatatttgactttttggttatttaacaaattattatttaacactatatgaaatttttttttttatcagcaaagaataaaattaaattaagaaggacaatggtgtcccaatccttatacaaccaacttccacaagaaagtcaagtcagagacaacaaaaaaacaagcaaaggaaattttttaatttgagttgtcttgtttgctgcataatttatgcagtaaaacactacacataacccttttagcagtagagcaatggttgaccgtgtgcttagcttcttttattttatttttttatcagcaaagaataaataaaataaaatgagacacttcagggatgtttcaacaagcttggatcctcgaagagaagggttaataacacacttttttaacatttttaacacaaattttagttatttaaaaatttattaaaaaatttaaaataagaagaggaactctttaaataaatctaacttacaaaatttatgatttttaataagttttcaccaataaaaaatgtcataaaaatatgttaaaaagtatattatcaatattctctttatgataaataaaaagaaaaaaaaaataaaagttaagtgaaaatgagattgaagtgactttaggtgtgtataaatatatcaaccccgccaacaatttatttaatccaaatatattgaagtatattattccatagcctttatttatttatatatttattatataaaagctttatttgttctaggttgttcatgaaatatttttttggttttatctccgttgtaagaaaatcatgtgctttgtgtcgccactcactattgcagctttttcatgcattggtcagattgacggttgattgtatttttgttttttatggttttgtgttatgacttaagtcttcatctctttatctcttcatcaggtttgatggttacctaatatggtccatgggtacatgcatggttaaattaggtggccaactttgttgtgaacgatagaattttttttatattaagtaaactatttttatattatgaaataataataaaaaaaatattttatcattattaacaaaatcatattagttaatttgttaactctataataaaagaaatactgtaacattcacattacatggtaacatctttccaccctttcatttgttttttgtttgatgactttttttcttgtttaaatttatttcccttcttttaaatttggaatacattatcatcatatataaactaaaatactaaaaacaggattacacaaatgataaataataacacaaatatttataaatctagctgcaatatatttaaactagctatatcgatattgtaaaataaaactagctgcattgatactgataaaaaaatatcatgtgctttctggactgatgatgcagtatacttttgacattgcctttattttatttttcagaaaagctttcttagttctgggttcttcattatttgtttcccatctccattgtgaattgaatcatttgcttcgtgtcacaaatacaatttagntaggtacatgcattggtcagattcacggtttattatgtcatgacttaagttcatggtagtacattacctgccacgcatgcattatattggttagatttgataggcaaatttggttgtcaacaatataaatataaataatgtttttatattacgaaataacagtgatcaaaacaaacagttttatctttattaacaagattttgtttttgtttgatgacgttttttaatgtttacgctttcccccttcttttgaatttagaacactttatcatcataaaatcaaatactaaaaaaattacatatttcataaataataacacaaatatttttaaaaaatctgaaataataatgaacaatattacatattatcacgaaaattcattaataaaaatattatataaataaaatgtaatagtagttatatgtaggaaaaaagtactgcacgcataatatatacaaaaagattaaaatgaactattataaataataacactaaattaatggtgaatcatatcaaaataatgaaaaagtaaataaaatttgtaattaacttctatatgtattacacacacaaataataaataatagtaaaaaaaattatgataaatatttaccatctcataagatatttaaaataatgataaaaatatagattattttttatgcaactagctagccaaaaagagaacacgggtatatataaaaagagtacctttaaattctactgtacttcctttattcctgacgtttttatatcaagtggacatacgtgaagattttaattatcagtctaaatatttcattagcacttaatacttttctgttttattcctatcctataagtagtcccgattctcccaacattgcttattcacacaactaactaagaaagtcttccatagccccccaagcggcccatggcctcctccgaggacgtcatcaaggagttcatgcgcttcaaggtgcgcatggagggctccgtgaacggccacgagttcgagatcgagggcgagggcgagggccgcccctacgagggcacccagaccgccaagctgaaggtgaccaagggcggccccctgcccttcgcctgggacatcctgtccccccagttccagtacggctccaaggtgtacgtgaagcaccccgccgacatccccgactacaagaagctgtccttccccgagggcttcaagtgggagcgcgtgatgaacttcgaggacggcggcgtggtgaccgtgacccaggactcctccctgcaggacggctccttcatctacaaggtgaagttcatcggcgtgaacttcccctccgacggccccgtaatgcagaagaagactatgggctgggaggcctccaccgagcgcctgtacccccgcgacggcgtgctgaagggcgagatccacaaggccctgaagctgaaggacggcggccactacctggtggagttcaagtccatctacatggccaagaagcccgtgcagctgcccggctactactacgtggactccaagctggacatcacctcccacaacgaggactacaccatcgtggagcagtacgagcgcgccgagggccgccaccacctgttcctgtagcggccggccgcgacacaagtgtgagagtactaaataaatgctttggttgtacgaaatcattacactaaataaaataatcaaagcttatatatgccttccgctaaggccgaatgcaaagaaattggttctttctcgttatcttttgccacttttactagtacgtattaattactacttaatcatctttgtttacggctcattatatccgtcgacggcgcgccgctctagagggcccaattcgccctatagtgagtcgtattacaattcactggccgtcgttttacaacgtcgtgactgggaaaaccctggcgttacccaacttaatcgccttgcagcacatccccctttcgccagctggcgtaatagcgaagaggcccgcaccgatcgcccttcccaacagttgcgcagcctatacgtacggcagtttaaggtttacacctataaaagagagagccgttatcgtctgtttgtggatgtacagagtgatattattgacacgccggggcgacggatggtgatccccctggccagtgcacgtctgctgtcagataaagtctcccgtgaactttacccggtggtgcatatcggggatgaaagctggcgcatgatgaccaccgatatggccagtgtgccggtctccgttatcggggaagaagtggctgatctcagccaccgcgaaaatgacatcaaaaacgccattaacctgatgttctggggaatataaatgtcaggcatgagattatcaaaaaggatcttcacctagatccttttcacgtagaaagccagtccgcagaaacggtgctgaccccggatgaatgtcagctactgggctatctggacaagggaaaacgcaagcgcaaagagaaagcaggtagcttgcagtgggcttacatggcgatagctagactgggcggttttatggacagcaagcgaaccggaattgccagctggggcgccctctggtaaggttgggaagccctgcaaagtaaactggatggctttcttgccgccaaggatctgatggcgcaggggatcaagctctgatcaagagacaggatgaggatcgtttcgcatgattgaacaagatggattgcacgcaggttctccggccgcttgggtggagaggctattcggctatgactgggcacaacagacaatcggctgctctgatgccgccgtgttccggctgtcagcgcaggggcgcccggttctttttgtcaagaccgacctgtccggtgccctgaatgaactgcaagacgaggcagcgcggctatcgtggctggccacgacgggcgttccttgcgcagctgtgctcgacgttgtcactgaagcgggaagggactggctgctattgggcgaagtgccggggcaggatctcctgtcatctcaccttgctcctgccgagaaagtatccatcatggctgatgcaatgcggcggctgcatacgcttgatccggctacctgcccattcgaccaccaagcgaaacatcgcatcgagcgagcacgtactcggatggaagccggtcttgtcgatcaggatgatctggacgaagagcatcaggggctcgcgccagccgaactgttcgccaggctcaaggcgagcatgcccgacggcgaggatctcgtcgtgacccatggcgatgcctgcttgccgaatatcatggtggaaaatggccgcttttctggattcatcgactgtggccggctgggtgtggcggaccgctatcaggacatagcgttggctacccgtgatattgctgaagagcttggcggcgaatgggctgaccgcttcctcgtgctttacggtatcgccgctcccgattcgcagcgcatcgccttctatcgccttcttgacgagttcttctgaattattaacgcttacaatttcctgatgcggtattttctccttacgcatctgtgcggtatttcacaccgcatcaggtggcacttttcggggaaatgtgcgcggaacccctatttgtttatttttctaaatacattcaaatatgtatccgctcatgagacaataaccctgataaatgcttcaataatagcacgtgaggagggccaccatggccaagttgaccagtgccgttccggtgctcaccgcgcgcgacgtcgccggagcggtcgagttctggaccgaccggctcgggttctcccgggacttcgtggaggacgacttcgccggtgtggtccgggacgacgtgaccctgttcatcagcgcggtccaggaccaggtggtgccggacaacaccctggcctgggtgtgggtgcgcggcctggacgagctgtacgccgagtggtcggaggtcgtgtccacgaacttccgggacgcctccgggccggccatgaccgagatcggcgagcagccgtgggggcgggagttcgccctgcgcgacccggccggcaactgcgtgcacttcgtggccgaggagcaggactgacacgtgctaaaacttcatttttaatttaaaaggatctaggtgaagatcctttttgataatctcatgaccaaaatcccttaacgtgagttttcgttccactgagcgtcagaccccgtagaaaagatcaaaggatcttcttgagatcctttttttctgcgcgtaatctgctgcttgcaaacaaaaaaaccaccgctaccagcggtggtttgtttgccggatcaagagctaccaactctttttccgaaggtaactggcttcagcagagcgcagataccaaatactgttcttctagtgtagccgtagttaggccaccacttcaagaactctgtagcaccgcctacatacctcgctctgctaatcctgttaccagtggctgctgccagtggcgataagtcgtgtcttaccgggttggactcaagacgatagttaccggataaggcgcagcggtcgggctgaacggggggttcgtgcacacagcccagcttggagcgaacgacctacaccgaactgagatacctacagcgtgagctatgagaaagcgccacgcttcccgaagggagaaaggcggacaggtatccggtaagcggcagggtcggaacaggagagcgcacgagggagcttccagggggaaacgcctggtatctttatagtcctgtcgggtttcgccacctctgacttgagcgtcgatttttgtgatgctcgtcaggggggcggagcctatggaaaaacgccagcaacgcggcctttttacggttcctggccttttgctggccttttgctcacatgttctttcctgcgttatcccctgattctgtggataaccgtattaccgcctttgagtgagctgataccgctcgccgcagccgaacgaccgagcgcagcgagtcagtgagcgaggaagcggaagagcgcccaatacgcaaaccgcctctccccgcgcgttggccgattcattaatgcagctggcacgacaggtttcccgactggaaagcgggcagtgagcgcaacgcaattaatgtgagttagctcactcattaggcaccccaggctttacactttatgcttccggctcgtatgttgtgtggaattgtgagcggataacaatttcacacaggaaacagctatgaccatgattacgccaagctatttaggtgacgcgttagaatactcaagctatgcatcaagcttggtaccgagctcggatccactagtaacggccgccagtgtgctggaattcaggggcgcgccccaatttattatcatctatttcctgacattttaatccatccacctatgtcaaaaacttatagaaaatgtcaacttccaaacaaaacataattgaacttcgcaaataaattcttaataatattaaaaaatgttacttaattatttcttcaaccccattttccgcgcgtagcgcggacaaagactctagttaaatatagaagtttccgattctcatcgtataaaacggtgactttggcgggctttcatgtgtaacaaattggtttaacaaaccactgcctagtcgtttagtgtagaatcagcgcatggaactccgattggagcgtgactttcacgtgccggaggcccaccaccacagcgggcgttacgctctaagaatctcgcccacggttttcttcatctcccccccgccaagtgtctccctcgttcgccacttctcatcatgttacagggaccataaaaatggcgtatttcttcagccccgggtataaatacacacatgatcctgtggtgggttcttccacaagttacatctccttctggtttttgtattgcaagtgtttgtattttttgcctccgagagaaaatcgcggccgcatggagagatctcaacggcagtctcctccgccaccgtcgccgtcctcctcctcgtcctccgtctccgcggacaccgtcctcgtccctcccggaaagaggcggagggcggcgacggccaaggccggcgccgagcctaataagaggatccgcaaggaccccgccgccgccgccgcggggaagaggagctccgtctacaggggagtcaccaggcacaggtggacgggcaggttcgaggcgcatctctgggacaagcactgcctcgccgcgctccacaacaagaagaaaggcaggcaagtctacctgggggcgtatgacagcgaggaggcagctgctcgtgcctatgacctcgcagctctcaagtactggggtcctgagactctgctcaacttccctgtggaggattactccagcgagatgccggagatggaggccgtgtcccgggaggagtacctggcctccctccgccgcaggagcagcggcttctccaggggcgtctccaagtacagaggcgtcgccaggcatcaccacaacgggaggtgggaggcacggattgggcgagtctttgggaacaagtacctctacttgggaacatttgacactcaagaagaggcagccaaggcctatgaccttgcggccattgaataccgtggcgtcaatgctgtaaccaacttcgacatcagctgctacctggaccacccgctgttcctggcacagctccaacaggagccacaggtggtgccggcactcaaccaagaacctcaacctgatcagagcgaaaccggaactacagagcaagagccggagtcaagcgaagccaagacaccggatggcagtgcagaacccgatgagaacgcggtgcctgacgacaccgcggagcccctcaccacagtcgacgacagcatcgaagagggcttgtggagcccttgcatggattacgagctagacaccatgtcgagaccaaactttggcagctcaatcaatctgagcgagtggttcgctgacgcagacttcgactgcaacatcggatgcctgttcgatgggtgttctgcggctgacgaaggaagcaaggatggtgtaggtctggcagatttcagtctgtttgaggcaggtgatgtccagctgaaggatgttctttcggatatggaagaggggatacaacctccagcgatgatcagtgtgtgcaacgc

SEQ ID NO: 66 - DNA, 19215 bp, Artificial sequence
  Vector ARALO78
  misc_feature (17405)..(17405): n is a, c, g, or t
cgcgcctcgagtgggcggatcccccgggctgcaggaattcactggccgtcgttttacaacgtcgtgactgggaaaaccctggcgttacccaacttaatcgccttgcagcacatccccctttcgccagctggcgtaatagcgaagaggcccgcaccgatcgcccttcccaacagttgcgcagcctgaatggcgaatggatcgatccatcgcgatgtaccttttgttagtcagcctctcgattgctcatcgtcattacacagtaccgaagtttgatcgatctagtaacatagatgacaccgcgcgcgataatttatcctagtttgcgcgctatattttgttttctatcgcgtattaaatgtataattgcgggactctaatcataaaaacccatctcataaataacgtcatgcattacatgttaattattacatgcttaacgtaattcaacagaaattatatgataatcatcgcaagaccggcaacaggattcaatcttaagaaactttattgccaaatgtttgaacgatctgcttcgacgcactccttctttactccaccatctcgtccttattgaaaacgtgggtagcaccaaaacgaatcaagtcgctggaactgaagttaccaatcacgctggatgatttgccagttggattaatcttgcctttccccgcatgaataatattgatgaatgcatgcgtgaggggtagttcgatgttggcaatagctgcaattgccgcgacatcctccaacgagcataattcttcagaaaaatagcgatgttccatgttgtcagggcatgcatgatgcacgttatgaggtgacggtgctaggcagtattccctcaaagtttcatagtcagtatcatattcatcattgcattcctgcaagagagaattgagacgcaatccacacgctgcggcaaccttccggcgttcgtggtctatttgctcttggacgttgcaaacgtaagtgttggatcgatccggggtgggcgaagaactccagcatgagatccccgcgctggaggatcatccagccggcgtcccggaaaacgattccgaagcccaacctttcatagaaggcggcggtggaatcgaaatctcgtgatggcaggttgggcgtcgcttggtcggtcatttcgaaccccagagtcccgctcagaagaactcgtcaagaaggcgatagaaggcgatgcgctgcgaatcgggagcggcgataccgtaaagcacgaggaagcggtcagcccattcgccgccaagctcttcagcaatatcacgggtagccaacgctatgtcctgatagcggtccgccacacccagccggccacagtcgatgaatccagaaaagcggccattttccaccatgatattcggcaagcaggcatcgccatgggtcacgacgagatcctcgccgtcgggcatgcgcgccttgagcctggcgaacagttcggctggcgcgagcccctgatgctcttcgtccagatcatcctgatcgacaagaccggcttccatccgagtacgtgctcgctcgatgcgatgtttcgcttggtggtcgaatgggcaggtagccggatcaagcgtatgcagccgccgcattgcatcagccatgatggatactttctcggcaggagcaaggtgagatgacaggagatcctgccccggcacttcgcccaatagcagccagtcccttcccgcttcagtgacaacgtcgagcacagctgcgcaaggaacgcccgtcgtggccagccacgatagccgcgctgcctcgtcctgcagttcattcagggcaccggacaggtcggtcttgacaaaaagaaccgggcgcccctgcgctgacagccggaacacggcggcatcagagcagccgattgtctgttgtgcccagtcatagccgaatagcctctccacccaagcggccggagaacctgcgtgcaatccatcttgttcaatcatgcgaaacgatccccgcaagcttggagactggtgatttcagcgtgtcctctccaaatgaaatgaacttccttatatagaggaagggtcttgcgaaggatagtgggattgtgcgtcatcccttacgtcagtggagatatcacatcaatccacttgctttgaagacgtggttggaacgtcttctttttccacgatgctcctcgtgggtgggggtccatctttgggaccactgtcggcagaggcatcttcaacgatggcctttcctttatcgcaatgatggcatttgtaggagccaccttccttttccactatcttcacaataaagtgacagatagctgggcaatggaatccgaggaggtttccggatattaccctttgttgaaaagtctcaattgccctttggtcttctgagactgtatctttgatatttttggagtagacaagcgtgtcgtgctccaccatgttgacgaagattttcttcttgtcattgagtcgtaagagactctgtatgaactgttcgccagtctttacggcgagttctgttaggtcctctatttgaatctttgactccatggcctttgattcagtgggaactacctttttagagactccaatctctattacttgccttggtttgtgaagcaagccttgaatcgtccatactggaatagtacttctgatcttgagaaatatatctttctctgtgttcttgatgcagttagtcctgaatcttttgactgcatctttaaccttcttgggaaggtatttgatctcctggagattattgctcgggtagatcgtcttgatgagacctgctgcgtaagcctctctaaccatctgtgggttagcattctttctgaaattgaaaaggctaatcttctcattatcagtggtgaacatggtatcgtcaccttctccgtcgaacttcctgactagatcgtagagatagaggaagtcgtccattgtgatctctggggcaaaggagatctgaattaattcgatatggtggatttatcacaaatgggacccgccgccgacagaggtgtgatgttaggccaggactttgaaaatttgcgcaactatcgtatagtggccgacaaattgacgccgagttgacagactgcctagcatttgagtgaattatgtgaggtaatgggctacactgaattggtagctcaaactgtcagtatttatgtatatgagtgtatattttcgcataatctcagaccaatctgaagatgaaatgggtatctgggaatggcgaaatcaaggcatcgatcgtgaagtttctcatctaagcccccatttggacgtgaatgtagacacgtcgaaataaagatttccgaattagaataatttgtttattgctttcgcctataaatacgacggatcgtaatttgtcgttttatcaaaatgtactttcattttataataacgctgcggacatctacatttttgaattgaaaaaaaattggtaattactctttctttttctccatattgaccatcatactcattgctgatccatgtagatttcccggacatgaagccatttacaattgaatatatcctgccgccgctgccgctttgcacccggtggagcttgcatgttggtttctacgcagaactgagccggttaggcagataatttccattgagaactgagccatgtgcaccttccccccaacacggtgagcgacggggcaacggagtgatccacatgggacttttaaacatcatccgtcggatggcgttgcgagagaagcagtcgatccgtgagatcagccgacgcaccgggcaggcgcgcaacacgatcgcaaagtatttgaacgcaggtacaatcgagccgacgttcacgcggaacgaccaagcaagctagctttaatgcggtagtttatcacagttaaattgctaacgcagtcaggcaccgtgtatgaaatctaacaatgcgctcatcgtcatcctcggcaccgtcaccctggatgctgtaggcataggcttggttatgccggtactgccgggcctcttgcgggatatcgtccattccgacagcatcgccagtcactatggcgtgctgctagcgctatatgcgttgatgcaatttctatgcgcacccgttctcggagcactgtccgaccgctttggccgccgcccagtcctgctcgcttcgctacttggagccactatcgactacgcgatcatggcgaccacacccgtcctgtggtccaacccctccgctgctatagtgcagtcggcttctgacgttcagtgcagccgtcttctgaaaacgacatgtcgcacaagtcctaagttacgcgacaggctgccgccctgcccttttcctggcgttttcttgtcgcgtgttttagtcgcataaagtagaatacttgcgactagaaccggagacattacgccatgaacaagagcgccgccgctggcctgctgggctatgcccgcgtcagcaccgacgaccaggacttgaccaaccaacgggccgaactgcacgcggccggctgcaccaagctgttttccgagaagatcaccggcaccaggcgcgaccgcccggagctggccaggatgcttgaccacctacgccctggcgacgttgtgacagtgaccaggctagaccgcctggcccgcagcacccgcgacctactggacattgccgagcgcatccaggaggccggcgcgggcctgcgtagcctggcagagccgtgggccgacaccaccacgccggccggccgcatggtgttgaccgtgttcgccggcattgccgagttcgagcgttccctaatcatcgaccgcacccggagcgggcgcgaggccgccaaggcccgaggcgtgaagtttggcccccgccctaccctcaccccggcacagatcgcgcacgcccgcgagctgatcgaccaggaaggccgcaccgtgaaagaggcggctgcactgcttggcgtgcatcgctcgaccctgtaccgcgcacttgagcgcagcgaggaagtgacgcccaccgaggccaggcggcgcggtgccttccgtgaggacgcattgaccgaggccgacgccctggcggccgccgagaatgaacgccaagaggaacaagcatgaaaccgcaccaggacggccaggacgaaccgtttttcattaccgaagagatcgaggcggagatgatcgcggccgggtacgtgttcgagccgcccgcgcacgtctcaaccgtgcggctgcatgaaatcctggccggtttgtctgatgccaagctggcggcctggccggccagcttggccgctgaagaaaccgagcgccgccgtctaaaaaggtgatgtgtatttgagtaaaacagcttgcgtcatgcggtcgctgcgtatatgatgcgatgagtaaataaacaaatacgcaagggaacgcatgaagttatcgctgtacttaaccagaaaggcgggtcaggcaagacgaccatcgcaacccatctagcccgcgccctgcaactcgccggggccgatgttctgttagtcgattccgatccccagggcagtgcccgcgattgggcggccgtgcgggaagatcaaccgctaaccgttgtcggcatcgaccgcccgacgattgaccgcgacgtgaaggccatcggccggcgcgacttcgtagtgatcgacggagcgccccaggcggcggacttggctgtgtccgcgatcaaggcagccgacttcgtgctgattccggtgcagccaagcccttacgacatatgggccaccgccgacctggtggagctggttaagcagcgcattgaggtcacggatggaaggctacaagcggcctttgtcgtgtcgcgggcgatcaaaggcacgcgcatcggcggtgaggttgccgaggcgctggccgggtacgagctgcccattcttgagtcccgtatcacgcagcgcgtgagctacccaggcactgccgccgccggcacaaccgttcttgaatcagaacccgagggcgacgctgcccgcgaggtccaggcgctggccgctgaaattaaatcaaaactcatttgagttaatgaggtaaagagaaaatgagcaaaagcacaaacacgctaagtgccggccgtccgagcgcacgcagcagcaaggctgcaacgttggccagcctggcagacacgccagccatgaagcgggtcaactttcagttgccggcggaggatcacaccaagctgaagatgtacgcggtacgccaaggcaagaccattaccgagctgctatctgaatacatcgcgcagctaccagagtaaatgagcaaatgaataaatgagtagatgaattttagcggctaaaggaggcggcatggaaaatcaagaacaaccaggcaccgacgccgtggaatgccccatgtgtggaggaacgggcggttggccaggcgtaagcggctgggttgtctgccggccctgcaatggcactggaacccccaagcccgaggaatcggcgtgagcggtcgcaaaccatccggcccggtacaaatcggcgcggcgctgggtgatgacctggtggagaagttgaaggccgcgcaggccgcccagcggcaacgcatcgaggcagaagcacgccccggtgaatcgtggcaagcggccgctgatcgaatccgcaaagaatcccggcaaccgccggcagccggtgcgccgtcgattaggaagccgcccaagggcgacgagcaaccagattttttcgttccgatgctctatgacgtgggcacccgcgatagtcgcagcatcatggacgtggccgttttccgtctgtcgaagcgtgaccgacgagctggcgaggtgatccgctacgagcttccagacgggcacgtagaggtttccgcagggccggccggcatggccagtgtgtgggattacgacctggtactgatggcggtttcccatctaaccgaatccatgaaccgataccgggaagggaagggagacaagcccggccgcgtgttccgtccacacgttgcggacgtactcaagttctgccggcgagccgatggcggaaagcagaaagacgacctggtagaaacctgcattcggttaaacaccacgcacgttgccatgcagcgtacgaagaaggccaagaacggccgcctggtgacggtatccgagggtgaagccttgattagccgctacaagatcgtaaagagcgaaaccgggcggccggagtacatcgagatcgagctagctgattggatgtaccgcgagatcacagaaggcaagaacccggacgtgctgacggttcaccccgattactttttgatcgatcccggcatcggccgttttctctaccgcctggcacgccgcgccgcaggcaaggcagaagccagatggttgttcaagacgatctacgaacgcagtggcagcgccggagagttcaagaagttctgtttcaccgtgcgcaagctgatcgggtcaaatgacctgccggagtacgatttgaaggaggaggcggggcaggctggcccgatcctagtcatgcgctaccgcaacctgatcgagggcgaagcatccgccggttcctaatgtacggagcagatgctagggcaaattgccctagcaggggaaaaaggtcgaaaaggtctctttcctgtggatagcacgtacattgggaacccaaagccgtacattgggaaccggaacccgtacattgggaacccaaagccgtacattgggaaccggtcacacatgtaagtgactgatataaaagagaaaaaaggcgatttttccgcctaaaactctttaaaacttattaaaactcttaaaacccgcctggcctgtgcataactgtctggccagcgcacagccgaagagctgcaaaaagcgcctacccttcggtcgctgcgctccctacgccccgccgcttcgcgtcggcctatcgcggccgctggccgctcaaaaatggctggcctacggccaggcaatctaccagggcgcggacaagccgcgccgtcgccactcgaccgccggcgcccacatcaaggcaccctgcctcgcgcgtttcggtgatgacggtgaaaacctctgacacatgcagctcccggagacggtcacagcttgtctgtaagcggatgccgggagcagacaagcccgtcagggcgcgtcagcgggtgttggcgggtgtcggggcgcagccatgacccagtcacgtagcgatagcggagtgtatactggcttaactatgcggcatcagagcagattgtactgagagtgcaccatatgcggtgtgaaataccgcacagatgcgtaaggagaaaataccgcatcaggcgctcttccgcttcctcgctcactgactcgctgcgctcggtcgttcggctgcggcgagcggtatcagctcactcaaaggcggtaatacggttatccacagaatcaggggataacgcaggaaagaacatgtgagcaaaaggccagcaaaaggccaggaaccgtaaaaaggccgcgttgctggcgtttttccataggctccgcccccctgacgagcatcacaaaaatcgacgctcaagtcagaggtggcgaaacccgacaggactataaagataccaggcgtttccccctggaagctccctcgtgcgctctcctgttccgaccctgccgcttaccggatacctgtccgcctttctcccttcgggaagcgtggcgctttctcatagctcacgctgtaggtatctcagttcggtgtaggtcgttcgctccaagctgggctgtgtgcacgaaccccccgttcagcccgaccgctgcgccttatccggtaactatcgtcttgagtccaacccggtaagacacgacttatcgccactggcagcagccactggtaacaggattagcagagcgaggtatgtaggcggtgctacagagttcttgaagtggtggcctaactacggctacactagaaggacagtatttggtatctgcgctctgctgaagccagttaccttcggaaaaagagttggtagctcttgatccggcaaacaaaccaccgctggtagcggtggtttttttgtttgcaagcagcagattacgcgcagaaaaaaaggatctcaagaagatcctttgatcttttctacggggtctgacgctcagtggaacgaaaactcacgttaagggattttggtcatgagattatcaaaaaggatcttcacctagatccttttaaattaaaaatgaagttttaaatcaatctaaagtatatatgagtaaacttggtctgacagttaccaatgcttaatcagtgaggcacctatctcagcgatctgtctatttcgttcatccatagttgcctgactccccgtcgtgtagataactacgatacgggagggcttaccatctggccccagtgctgcaatgataccgcgagacccacgctcaccggctccagatttatcagcaataaaccagccagccggaagggccgagcgcagaagtggtcctgcaactttatccgcctccatccagtctattaattgttgccgggaagctagagtaagtagttcgccagttaatagtttgcgcaacgttgttgccattgctacaggcatcgtggtgtcacgctcgtcgtttggtatggcttcattcagctccggttcccaacgatcaaggcgagttacatgatcccccatgttgtgcaaaaaagcggttagctccttcggtcctccgatcgttgtcagaagtaagttggccgcagtgttatcactcatggttatggcagcactgcataattctcttactgtcatgccatccgtaagatgcttttctgtgactggtgagtactcaaccaagtcattctgagaatagtgtatgcggcgaccgagttgctcttgcccggcgtcaacacgggataataccgcgccacatagcagaactttaaaagtgctcatcattggaaaagacctgcaggggggggggggcgctgaggtctgcctcgtgaagaaggtgttgctgactcataccaggcctgaatcgccccatcatccagccagaaagtgagggagccacggttgatgagagctttgttgtaggtggaccagttggtgattttgaacttttgctttgccacggaacggtctgcgttgtcgggaagatgcgtgatctgatccttcaactcagcaaaagttcgatttattcaacaaagccgccgtcccgtcaagtcagcgtaatgctctgccagtgttacaaccaattaaccaattctgattagaaaaactcatcgagcatcaaatgaaactgcaatttattcatatcaggattatcaataccatatttttgaaaaagccgtttctgtaatgaaggagaaaactcaccgaggcagttccataggatggcaagatcctggtatcggtctgcgattccgactcgtccaacatcaatacaacctattaatttcccctcgtcaaaaataaggttatcaagtgagaaatcaccatgagtgacgactgaatccggtgagaatggcaaaagcttatgcatttctttccagacttgttcaacaggccagccattacgctcgtcatcaaaatcactcgcatcaaccaaaccgttattcattcgtgattgcgcctgagcgagacgaaatacgcgatcgctgttaaaaggacaattacaaacaggaatcgaatgcaaccggcgcaggaacactgccagcgcatcaacaatattttcacctgaatcaggatattcttctaatacctggaatgctgttttcccggggatcgcagtggtgagtaaccatgcatcatcaggagtacggataaaatgcttgatggtcggaagaggcataaattccgtcagccagtttagtctgaccatctcatctgtaacatcattggcaacgctacctttgccatgtttcagaaacaactctggcgcatcgggcttcccatacaatcgatagattgtcgcacctgattgcccgacattatcgcgagcccatttatacccatataaatcagcatccatgttggaatttaatcgcggcctcgagcaagacgtttcccgttgaatatggctcataacaccccttgtattactgtttatgtaagcagacagttttattgttcatgatgatatatttttatcttgtgcaatgtaacatcagagattttgagacacaacgtggctttcccccccccccctgcaggtcaattcggtcgatatggctattacgaagaaggctcgtgcgcggagtcccgtgaactttcccacgcaacaagtgaaccgcaccgggtttgccggaggccatttcgttaaaatgcgcagccatggctgcttcgtccagcatggcgtaatactgatcctcgtcttcggctggcggtatattgccgatgggcttcaaaagccgccgtggttgaaccagtctatccattccaaggtagcgaactcgaccgcttcgaagctcctccatggtccacgccgatgaatgacctcggccttgtaaagaccgttgatcgcttctgcgagggcgttgtcgtgctgtcgccgacgcttccgatagatggctcgatacctgcttctgccaaccgctcggaatagcgaaaggacacgtattgaacaccgcgatccgagtgatgcactaggccgccatgagcgggacgccgatcatgatgagcctcctcgagggcatcgaggacaaagcctgcatgtgctgtccggctcgcccgccatccgacaatgcgacgggcgaagacgtcgatcacgaaggccacgtagacgaagccctcccaagtggcgacataagtacggacatgcgcaaaggctttcccggtttgtcgctgatggtgcaagagacgctgaagcgcgatccgatgcgcaggcatctgttcgtcttccgcggtcgtggcggtggcctgatcaaggtcactcgccgaagagctgcatgattggctcgaaaccgagcgggggaaattgtcgcgcagttctcccgtcgccgaggcgataaattacatgctcaagcgatgggatggcattacgtcattcctcgatgacggcccgatttgcctgacgaacaatgctgccgaacgaacgctcagaggctatgtactcggcaggaagtcatggctgtttgccggatcggatcgttgtgctgaacgtgcggcgttcatggcgacactgatcatgagcgccaagctcaataacatcgatccgcaggcctggcttgccgacgtccgcgccgaccttgcggacgctccgatcagcaggcttgagcaacagctgccgtggaactggacatccaagacactgagtgctcaggcggcctgacctgcggccttcaccggatacttaccccattatcgcagattgcgatgaagcatcagcgtcattcagcaatcttgccaaagtatgcaggctcgcgagaatcgacgtgcgaaaccggctggttgcgccaaagatccgcttgcggagcggtcgaacattcatgctgggacttcaagaggtcgagtagaggaagaaccggaaaggttgcaccggaaaatatgcgttcctttggagagcgcctcatggacgtgaacaaatcgcccggaccaaggatgccacggatacaaaagctcgcgaagctcggtcccgtgggtgttctgtcgtctcgttgtacaacgaaatccattcccattccgcgctcaagatggcttcccctcggcagttcatcagggctaaatcaatctagccgacttgtccggtgaaatgggctgcactccaacagaaacaatcaaacaaacatacacagcgacttattcacacgagctcaaattacaacggtatatatcctgccagtcagcatcatcacaccaaaagttaggcccgaatagtttgaaattagaaagctcgcaattgaggtctacaggccaaattcgctcttagccgtacaatattactcaccggtgcgatgccccccatcgtaggtgaaggtggaaattaatgatccatcttgagaccacaggcccacaacagctaccagtttcctcaagggtccaccaaaaacgtaagcgcttacgtacatggtcgataagaaaaggcaatttgtagatgttaacatccaacgtcgctttcagggatcgatccaatacgcaaaccgcctctccccgcgcgttggccgattcattaatgcagctggcacgacaggtttcccgactggaaagcgggcagtgagcgcaacgcaattaatgtgagttagctcactcattaggcaccccaggctttacactttatgcttccggctcgtatgttgtgtggaattgtgagcggataacaatttcacacaggaaacagctatgaccatgattacgccaagcttgcatgcctgcaggtcgactctagaggatctggcgcgccccaatttattatcatctatttcctgacattttaatccatccacctatgtcaaaaacttatagaaaatgtcaacttccaaacaaaacataattgaacttcgcaaataaattcttaataatattaaaaaatgttacttaattatttcttcaaccccattttccgcgcgtagcgcggacaaagactctagttaaatatagaagtttccgattctcatcgtataaaacggtgactttggcgggctttcatgtgtaacaaattggtttaacaaaccactgcctagtcgtttagtgtagaatcagcgcatggaactccgattggagcgtgactttcacgtgccggaggcccaccaccacagcgggcgttacgctctaagaatctcgcccacggttttcttcatctcccccccgccaagtgtctccctcgttcgccacttctcatcatgttacagggaccataaaaatggcgtatttcttcagccccgggtataaatacacacatgatcctgtggtgggttcttccacaagttacatctccttctggtttttgtattgcaagtgtttgtattttttgcctccgagagaaaatcgcggccgcatggagagatctcaacggcagtctcctccgccaccgtcgccgtcctcctcctcgtcctccgtctccgcggacaccgtcctcgtccctcccggaaagaggcggagggcggcgacggccaaggccggcgccgagcctaataagaggatccgcaaggaccccgccgccgccgccgcggggaagaggagctccgtctacaggggagtcaccaggcacaggtggacgggcaggttcgaggcgcatctctgggacaagcactgcctcgccgcgctccacaacaagaagaaaggcaggcaagtctacctgggggcgtatgacagcgaggaggcagctgctcgtgcctatgacctcgcagctctcaagtactggggtcctgagactctgctcaacttccctgtggaggattactccagcgagatgccggagatggaggccgtgtcccgggaggagtacctggcctccctccgccgcaggagcagcggcttctccaggggcgtctccaagtacagaggcgtcgccaggcatcaccacaacgggaggtgggaggcacggattgggcgagtctttgggaacaagtacctctacttgggaacatttgacactcaagaagaggcagccaaggcctatgaccttgcggccattgaataccgtggcgtcaatgctgtaaccaacttcgacatcagctgctacctggaccacccgctgttcctggcacagctccaacaggagccacaggtggtgccggcactcaaccaagaacctcaacctgatcagagcgaaaccggaactacagagcaagagccggagtcaagcgaagccaagacaccggatggcagtgcagaacccgatgagaacgcggtgcctgacgacaccgcggagcccctcaccacagtcgacgacagcatcgaagagggcttgtggagcccttgcatggattacgagctagacaccatgtcgagaccaaactttggcagctcaatcaatctgagcgagtggttcgctgacgcagacttcgactgcaacatcggatgcctgttcgatgggtgttctgcggctgacgaaggaagcaaggatggtgtaggtctggcagatttcagtctgtttgaggcaggtgatgtccagctgaaggatgttctttcggatatggaagaggggatacaacctccagcgatgatcagtgtgtgcaacgcggccgcaagtatgaactaaaatgcatgtaggtgtaagagctcatggagagcatggaatattgtatccgaccatgtaacagtataataactgagctccatctcacttcttctatgaataaacaaaggatgttatgatatattaacactctatctatgcaccttattgttctatgataaatttcctcttattattataaatcatctgaatcgtgacggcttatggaatgcttcaaatagtacaaaaacaaatgtgtactataagactttctaaacaattctaaccttagcattgtgaacgagacataagtgttaagaagacataacaattataatggaagaagtttgtctccatttatatattatatattacccacttatgtattatattaggatgttaaggagacataacaattataaagagagaagtttgtatccatttatatattatatactacccatttatatattatacttatccacttatttaatgtctttataaggtttgatccatgatatttctaatattttagttgatatgtatatgaaagggtactatttgaactctcttactctgtataaaggttggatcatccttaaagtgggtctatttaattttattgcttcttacagataaaaaaaaaattatgagttggtttgataaaatattgaaggatttaaaataataataaataacatataatatatgtatataaatttattataatataacatttatctataaaaaagtaaatattgtcataaatctatacaatcgtttagccttgctggacgaatctcaattatttaaacgagagtaaacatatttgactttttggttatttaacaaattattatttaacactatatgaaatttttttttttatcagcaaagaataaaattaaattaagaaggacaatggtgtcccaatccttatacaaccaacttccacaagaaagtcaagtcagagacaacaaaaaaacaagcaaaggaaattttttaatttgagttgtcttgtttgctgcataatttatgcagtaaaacactacacataacccttttagcagtagagcaatggttgaccgtgtgcttagcttcttttattttatttttttatcagcaaagaataaataaaataaaatgagacacttcagggatgtttcaacaagcttggatcctcgaagagaagggttaataacacacttttttaacatttttaacacaaattttagttatttaaaaatttattaaaaaatttaaaataagaagaggaactctttaaataaatctaacttacaaaatttatgatttttaataagttttcaccaataaaaaatgtcataaaaatatgttaaaaagtatattatcaatattctctttatgataaataaaaagaaaaaaaaaataaaagttaagtgaaaatgagattgaagtgactttaggtgtgtataaatatatcaaccccgccaacaatttatttaatccaaatatattgaagtatattattccatagcctttatttatttatatatttattatataaaagctttatttgttctaggttgttcatgaaatatttttttggttttatctccgttgtaagaaaatcatgtgctttgtgtcgccactcactattgcagctttttcatgcattggtcagattgacggttgattgtatttttgttttttatggttttgtgttatgacttaagtcttcatctctttatctcttcatcaggtttgatggttacctaatatggtccatgggtacatgcatggttaaattaggtggccaactttgttgtgaacgatagaattttttttatattaagtaaactatttttatattatgaaataataataaaaaaaatattttatcattattaacaaaatcatattagttaatttgttaactctataataaaagaaatactgtaacattcacattacatggtaacatctttccaccctttcatttgttttttgtttgatgactttttttcttgtttaaatttatttcccttcttttaaatttggaatacattatcatcatatataaactaaaatactaaaaacaggattacacaaatgataaataataacacaaatatttataaatctagctgcaatatatttaaactagctatatcgatattgtaaaataaaactagctgcattgatactgataaaaaaatatcatgtgctttctggactgatgatgcagtatacttttgacattgcctttattttatttttcagaaaagctttcttagttctgggttcttcattatttgtttcccatctccattgtgaattgaatcatttgcttcgtgtcacaaatacaatttagntaggtacatgcattggtcagattcacggtttattatgtcatgacttaagttcatggtagtacattacctgccacgcatgcattatattggttagatttgataggcaaatttggttgtcaacaatataaatataaataatgtttttatattacgaaataacagtgatcaaaacaaacagttttatctttattaacaagattttgtttttgtttgatgacgttttttaatgtttacgctttcccccttcttttgaatttagaacactttatcatcataaaatcaaatactaaaaaaattacatatttcataaataataacacaaatatttttaaaaaatctgaaataataatgaacaatattacatattatcacgaaaattcattaataaaaatattatataaataaaatgtaatagtagttatatgtaggaaaaaagtactgcacgcataatatatacaaaaagattaaaatgaactattataaataataacactaaattaatggtgaatcatatcaaaataatgaaaaagtaaataaaatttgtaattaacttctatatgtattacacacacaaataataaataatagtaaaaaaaattatgataaatatttaccatctcataagatatttaaaataatgataaaaatatagattattttttatgcaactagctagccaaaaagagaacacgggtatatataaaaagagtacctttaaattctactgtacttcctttattcctgacgtttttatatcaagtggacatacgtgaagattttaattatcagtctaaatatttcattagcacttaatacttttctgttttattcctatcctataagtagtcccgattctcccaacattgcttattcacacaactaactaagaaagtcttccatagccccccaagcggcccatggcctcctccgaggacgtcatcaaggagttcatgcgcttcaaggtgcgcatggagggctccgtgaacggccacgagttcgagatcgagggcgagggcgagggccgcccctacgagggcacccagaccgccaagctgaaggtgaccaagggcggccccctgcccttcgcctgggacatcctgtccccccagttccagtacggctccaaggtgtacgtgaagcaccccgccgacatccccgactacaagaagctgtccttccccgagggcttcaagtgggagcgcgtgatgaacttcgaggacggcggcgtggtgaccgtgacccaggactcctccctgcaggacggctccttcatctacaaggtgaagttcatcggcgtgaacttcccctccgacggccccgtaatgcagaagaagactatgggctgggaggcctccaccgagcgcctgtacccccgcgacggcgtgctgaagggcgagatccacaaggccctgaagctgaaggacggcggccactacctggtggagttcaagtccatctacatggccaagaagcccgtgcagctgcccggctactactacgtggactccaagctggacatcacctcccacaacgaggactacaccatcgtggagcagtacgagcgcgccgagggccgccaccacctgttcctgtagcggccggccgcgacacaagtgtgagagtactaaataaatgctttggttgtacgaaatcattacactaaataaaataatcaaagcttatatatgccttccgctaaggccgaatgcaaagaaattggttctttctcgttatcttttgccacttttactagtacgtattaattactacttaatcatctttgtttacggctcattatatccgtcgacgg

SEQ ID NO: 67 - DNA, 9565 bp, Artificial sequence
  Vector KS428
  misc_feature (4330)..(4330): n is a, c, g, or t
  misc_feature (7746)..(7746): n is a, c, g, or t
ctagagggcccaattcgccctatagtgagtcgtattacaattcactggccgtcgttttacaacgtcgtgactgggaaaaccctggcgttacccaacttaatcgccttgcagcacatccccctttcgccagctggcgtaatagcgaagaggcccgcaccgatcgcccttcccaacagttgcgcagcctatacgtacggcagtttaaggtttacacctataaaagagagagccgttatcgtctgtttgtggatgtacagagtgatattattgacacgccggggcgacggatggtgatccccctggccagtgcacgtctgctgtcagataaagtctcccgtgaactttacccggtggtgcatatcggggatgaaagctggcgcatgatgaccaccgatatggccagtgtgccggtctccgttatcggggaagaagtggctgatctcagccaccgcgaaaatgacatcaaaaacgccattaacctgatgttctggggaatataaatgtcaggcatgagattatcaaaaaggatcttcacctagatccttttcacgtagaaagccagtccgcagaaacggtgctgaccccggatgaatgtcagctactgggctatctggacaagggaaaacgcaagcgcaaagagaaagcaggtagcttgcagtgggcttacatggcgatagctagactgggcggttttatggacagcaagcgaaccggaattgccagctggggcgccctctggtaaggttgggaagccctgcaaagtaaactggatggctttcttgccgccaaggatctgatggcgcaggggatcaagctctgatcaagagacaggatgaggatcgtttcgcatgattgaacaagatggattgcacgcaggttctccggccgcttgggtggagaggctattcggctatgactgggcacaacagacaatcggctgctctgatgccgccgtgttccggctgtcagcgcaggggcgcccggttctttttgtcaagaccgacctgtccggtgccctgaatgaactgcaagacgaggcagcgcggctatcgtggctggccacgacgggcgttccttgcgcagctgtgctcgacgttgtcactgaagcgggaagggactggctgctattgggcgaagtgccggggcaggatctcctgtcatctcaccttgctcctgccgagaaagtatccatcatggctgatgcaatgcggcggctgcatacgcttgatccggctacctgcccattcgaccaccaagcgaaacatcgcatcgagcgagcacgtactcggatggaagccggtcttgtcgatcaggatgatctggacgaagagcatcaggggctcgcgccagccgaactgttcgccaggctcaaggcgagcatgcccgacggcgaggatctcgtcgtgacccatggcgatgcctgcttgccgaatatcatggtggaaaatggccgcttttctggattcatcgactgtggccggctgggtgtggcggaccgctatcaggacatagcgttggctacccgtgatattgctgaagagcttggcggcgaatgggctgaccgcttcctcgtgctttacggtatcgccgctcccgattcgcagcgcatcgccttctatcgccttcttgacgagttcttctgaattattaacgcttacaatttcctgatgcggtattttctccttacgcatctgtgcggtatttcacaccgcatcaggtggcacttttcggggaaatgtgcgcggaacccctatttgtttatttttctaaatacattcaaatatgtatccgctcatgagacaataaccctgataaatgcttcaataatagcacgtgaggagggccaccatggccaagttgaccagtgccgttccggtgctcaccgcgcgcgacgtcgccggagcggtcgagttctggaccgaccggctcgggttctcccgggacttcgtggaggacgacttcgccggtgtggtccgggacgacgtgaccctgttcatcagcgcggtccaggaccaggtggtgccggacaacaccctggcctgggtgtgggtgcgcggcctggacgagctgtacgccgagtggtcggaggtcgtgtccacgaacttccgggacgcctccgggccggccatgaccgagatcggcgagcagccgtgggggcgggagttcgccctgcgcgacccggccggcaactgcgtgcacttcgtggccgaggagcaggactgacacgtgctaaaacttcatttttaatttaaaaggatctaggtgaagatcctttttgataatctcatgaccaaaatcccttaacgtgagttttcgttccactgagcgtcagaccccgtagaaaagatcaaaggatcttcttgagatcctttttttctgcgcgtaatctgctgcttgcaaacaaaaaaaccaccgctaccagcggtggtttgtttgccggatcaagagctaccaactctttttccgaaggtaactggcttcagcagagcgcagataccaaatactgttcttctagtgtagccgtagttaggccaccacttcaagaactctgtagcaccgcctacatacctcgctctgctaatcctgttaccagtggctgctgccagtggcgataagtcgtgtcttaccgggttggactcaagacgatagttaccggataaggcgcagcggtcgggctgaacggggggttcgtgcacacagcccagcttggagcgaacgacctacaccgaactgagatacctacagcgtgagctatgagaaagcgccacgcttcccgaagggagaaaggcggacaggtatccggtaagcggcagggtcggaacaggagagcgcacgagggagcttccagggggaaacgcctggtatctttatagtcctgtcgggtttcgccacctctgacttgagcgtcgatttttgtgatgctcgtcaggggggcggagcctatggaaaaacgccagcaacgcggcctttttacggttcctggccttttgctggccttttgctcacatgttctttcctgcgttatcccctgattctgtggataaccgtattaccgcctttgagtgagctgataccgctcgccgcagccgaacgaccgagcgcagcgagtcagtgagcgaggaagcggaagagcgcccaatacgcaaaccgcctctccccgcgcgttggccgattcattaatgcagctggcacgacaggtttcccgactggaaagcgggcagtgagcgcaacgcaattaatgtgagttagctcactcattaggcaccccaggctttacactttatgcttccggctcgtatgttgtgtggaattgtgagcggataacaatttcacacaggaaacagctatgaccatgattacgccaagctatttaggtgacgcgttagaatactcaagctatgcatcaagcttggtaccgagctcggatccactagtaacggccgccagtgtgctggaattcaggggcgcgccctatagatgggatgaagctgctctcgacaaatctgataaaactaaagaaggttagtaatcaatttttacaaaatcatagattatttttttcattgaattatttttatgctataccaagaattgtattttagtatttgttttaactacatataatagaattaactacatataaattaactaaacttaaaataaaaatagatttgtttcctgaaattattttaagaatatatatgtatatatctaaaatcttagacttagatagatttttctatctatctattttggttacttaaaataaataaatttgtataaataattgtatagttatcaaaaattaaaactaatttttttaaagttgttgatatataaaatactaaagatttaacgattaagtatttatttaagtatagaattttgttttttttttaagtttagttatgaagttgttaattatattaaaacaaaacaatatttcgaaattttattatcatattcgaatatattttttttagtgatgatgtatgaattattatcataatttgaaagtttactaaaaaatatatcaacatgaattgtaatatatgagttattaccttaaccaaaattataaattaacattaaatataattatatatgtcatatttagccatacaatgtgtcatcaatattaatagtcatgtcaatattacataatgccaatattatgctacttaaaccccaaatcccctaactcccgttaagtagccaaattcataaatatacttattcgacaaaataaaaaactttaaaatatttactaatccgaccatgcacaagcatccattccctattccattgccacgggataacaatgcaaccnactcctcaaaaaaagaaaaattcaagctcttttgcaaaaaaaaataaaataattttaacacctaaaattttttgtttccaaacttctacagggaacacacataaaagaaaaagaggacgtccactcggatcacgcaacaaaccaaaaggtgtgtcatgactcctaagatataatatttccttattcaaaatcataccattttaaattatgaatgtatttcgtagtccaccagatatgtaatccaccagcgttcaaaccaaagttttatgattgtaagtttaagtgaattataataatatattcttcacggtatcttttcataactaattgagttatcaaacttgatcgcacatgtggctttgataggtgtgacttttatggtatacaattctttcaacctaaaaacattattgttcctcaatatcttacattatgcttgactgcaacaaaatattttctcatctgttttcttcctttaaaccaatttattatcatctatttcctgacattttaatccatccacctatgtcaaaaacttatagaaaatgtcaacttccaaacaaaacataattgaacttcgcaaataaattcttaataatattaaaaaatgttacttaattatttcttcaaccccattttccgcgcgtagcgcggacaaagactctagttaaatatagaagtttccgattctcatcgtataaaacggtgactttggcgggctttcatgtgtaacaaattggtttaacaaaccactgcctagtcgtttagtgtagaatcagcgcatggaactccgattggagcgtgactttcacgtgccggaggcccaccaccacagcgggcgttacgctctaagaatctcgcccacggttttcttcatctgccccccgccaagtgtcttcctcgttcgccacttctcaccaagttacaggaaccctaaaaatggcctttcttcagccccggctataatacacacatgatcctatagtgggttcttccacaagttacatctccttctggattgtacatttcaagtgtttgtgttttttctgcctctgagagaaaatcgcggccgcaagtatgaactaaaatgcatgtaggtgtaagagctcatggagagcatggaatattgtatccgaccatgtaacagtataataactgagctccatctcacttcttctatgaataaacaaaggatgttatgatatattaacactctatctatgcaccttattgttctatgataaatttcctcttattattataaatcatctgaatcgtgacggcttatggaatgcttcaaatagtacaaaaacaaatgtgtactataagactttctaaacaattctaaccttagcattgtgaacgagacataagtgttaagaagacataacaattataatggaagaagtttgtctccatttatatattatatattacccacttatgtattatattaggatgttaaggagacataacaattataaagagagaagtttgtatccatttatatattatatactacccatttatatattatacttatccacttatttaatgtctttataaggtttgatccatgatatttctaatattttagttgatatgtatatgaaagggtactatttgaactctcttactctgtataaaggttggatcatccttaaagtgggtctatttaattttattgcttcttacagataaaaaaaaaattatgagttggtttgataaaatattgaaggatttaaaataataataaataacatataatatatgtatataaatttattataatataacatttatctataaaaaagtaaatattgtcataaatctatacaatcgtttagccttgctggacgaatctcaattatttaaacgagagtaaacatatttgactttttggttatttaacaaattattatttaacactatatgaaatttttttttttatcagcaaagaataaaattaaattaagaaggacaatggtgtcccaatccttatacaaccaacttccacaagaaagtcaagtcagagacaacaaaaaaacaagcaaaggaaattttttaatttgagttgtcttgtttgctgcataatttatgcagtaaaacactacacataacccttttagcagtagagcaatggttgaccgtgtgcttagcttcttttattttatttttttatcagcaaagaataaataaaataaaatgagacacttcagggatgtttcaacaagcttggatcctcgaagagaagggttaataacacacttttttaacatttttaacacaaattttagttatttaaaaatttattaaaaaatttaaaataagaagaggaactctttaaataaatctaacttacaaaatttatgatttttaataagttttcaccaataaaaaatgtcataaaaatatgttaaaaagtatattatcaatattctctttatgataaataaaaagaaaaaaaaaataaaagttaagtgaaaatgagattgaagtgactttaggtgtgtataaatatatcaaccccgccaacaatttatttaatccaaatatattgaagtatattattccatagcctttatttatttatatatttattatataaaagctttatttgttctaggttgttcatgaaatatttttttggttttatctccgttgtaagaaaatcatgtgctttgtgtcgccactcactattgcagctttttcatgcattggtcagattgacggttgattgtatttttgttttttatggttttgtgttatgacttaagtcttcatctctttatctcttcatcaggtttgatggttacctaatatggtccatgggtacatgcatggttaaattaggtggccaactttgttgtgaacgatagaattttttttatattaagtaaactatttttatattatgaaataataataaaaaaaatattttatcattattaacaaaatcatattagttaatttgttaactctataataaaagaaatactgtaacattcacattacatggtaacatctttccaccctttcatttgttttttgtttgatgactttttttcttgtttaaatttatttcccttcttttaaatttggaatacattatcatcatatataaactaaaatactaaaaacaggattacacaaatgataaataataacacaaatatttataaatctagctgcaatatatttaaactagctatatcgatattgtaaaataaaactagctgcattgatactgataaaaaaatatcatgtgctttctggactgatgatgcagtatacttttgacattgcctttattttatttttcagaaaagctttcttagttctgggttcttcattatttgtttcccatctccattgtgaattgaatcatttgcttcgtgtcacaaatacaatttagntaggtacatgcattggtcagattcacggtttattatgtcatgacttaagttcatggtagtacattacctgccacgcatgcattatattggttagatttgataggcaaatttggttgtcaacaatataaatataaataatgtttttatattacgaaataacagtgatcaaaacaaacagttttatctttattaacaagattttgtttttgtttgatgacgttttttaatgtttacgctttcccccttcttttgaatttagaacactttatcatcataaaatcaaatactaaaaaaattacatatttcataaataataacacaaatatttttaaaaaatctgaaataataatgaacaatattacatattatcacgaaaattcattaataaaaatattatataaataaaatgtaatagtagttatatgtaggaaaaaagtactgcacgcataatatatacaaaaagattaaaatgaactattataaataataacactaaattaatggtgaatcatatcaaaataatgaaaaagtaaataaaatttgtaattaacttctatatgtattacacacacaaataataaataatagtaaaaaaaattatgataaatatttaccatctcataagatatttaaaataatgataaaaatatagattattttttatgcaactagctagccaaaaagagaacacgggtatatataaaaagagtacctttaaattctactgtacttcctttattcctgacgtttttatatcaagtggacatacgtgaagattttaattatcagtctaaatatttcattagcacttaatacttttctgttttattcctatcctataagtagtcccgattctcccaacattgcttattcacacaactaactaagaaagtcttccatagccccccaagcggcccatggcctcctccgaggacgtcatcaaggagttcatgcgcttcaaggtgcgcatggagggctccgtgaacggccacgagttcgagatcgagggcgagggcgagggccgcccctacgagggcacccagaccgccaagctgaaggtgaccaagggcggccccctgcccttcgcctgggacatcctgtccccccagttccagtacggctccaaggtgtacgtgaagcaccccgccgacatccccgactacaagaagctgtccttccccgagggcttcaagtgggagcgcgtgatgaacttcgaggacggcggcgtggtgaccgtgacccaggactcctccctgcaggacggctccttcatctacaaggtgaagttcatcggcgtgaacttcccctccgacggccccgtaatgcagaagaagactatgggctgggaggcctccaccgagcgcctgtacccccgcgacggcgtgctgaagggcgagatccacaaggccctgaagctgaaggacggcggccactacctggtggagttcaagtccatctacatggccaagaagcccgtgcagctgcccggctactactacgtggactccaagctggacatcacctcccacaacgaggactacaccatcgtggagcagtacgagcgcgccgagggccgccaccacctgttcctgtagcggccggccgcgacacaagtgtgagagtactaaataaatgctttggttgtacgaaatcattacactaaataaaataatcaaagcttatatatgccttccgctaaggccgaatgcaaagaaattggttctttctcgttatcttttgccacttttactagtacgtattaattactacttaatcatctttgtttacggctcattatatccgtcgacggcgcgccgct

SEQ ID NO: 68 - DNA, 10947 bp, Artificial sequence
  Vector KS429
  misc_feature (2349)..(2349): n is a, c, g, or t
  misc_feature (8498)..(8498): n is a, c, g, or t
ggccgcaagtatgaactaaaatgcatgtaggtgtaagagctcatggagagcatggaatattgtatccgaccatgtaacagtataataactgagctccatctcacttcttctatgaataaacaaaggatgttatgatatattaacactctatctatgcaccttattgttctatgataaatttcctcttattattataaatcatctgaatcgtgacggcttatggaatgcttcaaatagtacaaaaacaaatgtgtactataagactttctaaacaattctaaccttagcattgtgaacgagacataagtgttaagaagacataacaattataatggaagaagtttgtctccatttatatattatatattacccacttatgtattatattaggatgttaaggagacataacaattataaagagagaagtttgtatccatttatatattatatactacccatttatatattatacttatccacttatttaatgtctttataaggtttgatccatgatatttctaatattttagttgatatgtatatgaaagggtactatttgaactctcttactctgtataaaggttggatcatccttaaagtgggtctatttaattttattgcttcttacagataaaaaaaaaattatgagttggtttgataaaatattgaaggatttaaaataataataaataacatataatatatgtatataaatttattataatataacatttatctataaaaaagtaaatattgtcataaatctatacaatcgtttagccttgctggacgaatctcaattatttaaacgagagtaaacatatttgactttttggttatttaacaaattattatttaacactatatgaaatttttttttttatcagcaaagaataaaattaaattaagaaggacaatggtgtcccaatccttatacaaccaacttccacaagaaagtcaagtcagagacaacaaaaaaacaagcaaaggaaattttttaatttgagttgtcttgtttgctgcataatttatgcagtaaaacactacacataacccttttagcagtagagcaatggttgaccgtgtgcttagcttcttttattttatttttttatcagcaaagaataaataaaataaaatgagacacttcagggatgtttcaacaagcttggatcctcgaagagaagggttaataacacacttttttaacatttttaacacaaattttagttatttaaaaatttattaaaaaatttaaaataagaagaggaactctttaaataaatctaacttacaaaatttatgatttttaataagttttcaccaataaaaaatgtcataaaaatatgttaaaaagtatattatcaatattctctttatgataaataaaaagaaaaaaaaaataaaagttaagtgaaaatgagattgaagtgactttaggtgtgtataaatatatcaaccccgccaacaatttatttaatccaaatatattgaagtatattattccatagcctttatttatttatatatttattatataaaagctttatttgttctaggttgttcatgaaatatttttttggttttatctccgttgtaagaaaatcatgtgctttgtgtcgccactcactattgcagctttttcatgcattggtcagattgacggttgattgtatttttgttttttatggttttgtgttatgacttaagtcttcatctctttatctcttcatcaggtttgatggttacctaatatggtccatgggtacatgcatggttaaattaggtggccaactttgttgtgaacgatagaattttttttatattaagtaaactatttttatattatgaaataataataaaaaaaatattttatcattattaacaaaatcatattagttaatttgttaactctataataaaagaaatactgtaacattcacattacatggtaacatctttccaccctttcatttgttttttgtttgatgactttttttcttgtttaaatttatttcccttcttttaaatttggaatacattatcatcatatataaactaaaatactaaaaacaggattacacaaatgataaataataacacaaatatttataaatctagctgcaatatatttaaactagctatatcgatattgtaaaataaaactagctgcattgatactgataaaaaaatatcatgtgctttctggactgatgatgcagtatacttttgacattgcctttattttatttttcagaaaagctttcttagttctgggttcttcattatttgtttcccatctccattgtgaattgaatcatttgcttcgtgtcacaaatacaatttagntaggtacatgcattggtcagattcacggtttattatgtcatgacttaagttcatggtagtacattacctgccacgcatgcattatattggttagatttgataggcaaatttggttgtcaacaatataaatataaataatgtttttatattacgaaataacagtgatcaaaacaaacagttttatctttattaacaagattttgtttttgtttgatgacgttttttaatgtttacgctttcccccttcttttgaatttagaacactttatcatcataaaatcaaatactaaaaaaattacatatttcataaataataacacaaatatttttaaaaaatctgaaataataatgaacaatattacatattatcacgaaaattcattaataaaaatattatataaataaaatgtaatagtagttatatgtaggaaaaaagtactgcacgcataatatatacaaaaagattaaaatgaactattataaataataacactaaattaatggtgaatcatatcaaaataatgaaaaagtaaataaaatttgtaattaacttctatatgtattacacacacaaataataaataatagtaaaaaaaattatgataaatatttaccatctcataagatatttaaaataatgataaaaatatagattattttttatgcaactagctagccaaaaagagaacacgggtatatataaaaagagtacctttaaattctactgtacttcctttattcctgacgtttttatatcaagtggacatacgtgaagattttaattatcagtctaaatatttcattagcacttaatacttttctgttttattcctatcctataagtagtcccgattctcccaacattgcttattcacacaactaactaagaaagtcttccatagccccccaagcggcccatggcctcctccgaggacgtcatcaaggagttcatgcgcttcaaggtgcgcatggagggctccgtgaacggccacgagttcgagatcgagggcgagggcgagggccgcccctacgagggcacccagaccgccaagctgaaggtgaccaagggcggccccctgcccttcgcctgggacatcctgtccccccagttccagtacggctccaaggtgtacgtgaagcaccccgccgacatccccgactacaagaagctgtccttccccgagggcttcaagtgggagcgcgtgatgaacttcgaggacggcggcgtggtgaccgtgacccaggactcctccctgcaggacggctccttcatctacaaggtgaagttcatcggcgtgaacttcccctccgacggccccgtaatgcagaagaagactatgggctgggaggcctccaccgagcgcctgtacccccgcgacggcgtgctgaagggcgagatccacaaggccctgaagctgaaggacggcggccactacctggtggagttcaagtccatctacatggccaagaagcccgtgcagctgcccggctactactacgtggactccaagctggacatcacctcccacaacgaggactacaccatcgtggagcagtacgagcgcgccgagggccgccaccacctgttcctgtagcggccggccgcgacacaagtgtgagagtactaaataaatgctttggttgtacgaaatcattacactaaataaaataatcaaagcttatatatgccttccgctaaggccgaatgcaaagaaattggttctttctcgttatcttttgccacttttactagtacgtattaattactacttaatcatctttgtttacggctcattatatccgtcgacggcgcgccgctctagagggcccaattcgccctatagtgagtcgtattacaattcactggccgtcgttttacaacgtcgtgactgggaaaaccctggcgttacccaacttaatcgccttgcagcacatccccctttcgccagctggcgtaatagcgaagaggcccgcaccgatcgcccttcccaacagttgcgcagcctatacgtacggcagtttaaggtttacacctataaaagagagagccgttatcgtctgtttgtggatgtacagagtgatattattgacacgccggggcgacggatggtgatccccctggccagtgcacgtctgctgtcagataaagtctcccgtgaactttacccggtggtgcatatcggggatgaaagctggcgcatgatgaccaccgatatggccagtgtgccggtctccgttatcggggaagaagtggctgatctcagccaccgcgaaaatgacatcaaaaacgccattaacctgatgttctggggaatataaatgtcaggcatgagattatcaaaaaggatcttcacctagatccttttcacgtagaaagccagtccgcagaaacggtgctgaccccggatgaatgtcagctactgggctatctggacaagggaaaacgcaagcgcaaagagaaagcaggtagcttgcagtgggcttacatggcgatagctagactgggcggttttatggacagcaagcgaaccggaattgccagctggggcgccctctggtaaggttgggaagccctgcaaagtaaactggatggctttcttgccgccaaggatctgatggcgcaggggatcaagctctgatcaagagacaggatgaggatcgtttcgcatgattgaacaagatggattgcacgcaggttctccggccgcttgggtggagaggctattcggctatgactgggcacaacagacaatcggctgctctgatgccgccgtgttccggctgtcagcgcaggggcgcccggttctttttgtcaagaccgacctgtccggtgccctgaatgaactgcaagacgaggcagcgcggctatcgtggctggccacgacgggcgttccttgcgcagctgtgctcgacgttgtcactgaagcgggaagggactggctgctattgggcgaagtgccggggcaggatctcctgtcatctcaccttgctcctgccgagaaagtatccatcatggctgatgcaatgcggcggctgcatacgcttgatccggctacctgcccattcgaccaccaagcgaaacatcgcatcgagcgagcacgtactcggatggaagccggtcttgtcgatcaggatgatctggacgaagagcatcaggggctcgcgccagccgaactgttcgccaggctcaaggcgagcatgcccgacggcgaggatctcgtcgtgacccatggcgatgcctgcttgccgaatatcatggtggaaaatggccgcttttctggattcatcgactgtggccggctgggtgtggcggaccgctatcaggacatagcgttggctacccgtgatattgctgaagagcttggcggcgaatgggctgaccgcttcctcgtgctttacggtatcgccgctcccgattcgcagcgcatcgccttctatcgccttcttgacgagttcttctgaattattaacgcttacaatttcctgatgcggtattttctccttacgcatctgtgcggtatttcacaccgcatcaggtggcacttttcggggaaatgtgcgcggaacccctatttgtttatttttctaaatacattcaaatatgtatccgctcatgagacaataaccctgataaatgcttcaataatagcacgtgaggagggccaccatggccaagttgaccagtgccgttccggtgctcaccgcgcgcgacgtcgccggagcggtcgagttctggaccgaccggctcgggttctcccgggacttcgtggaggacgacttcgccggtgtggtccgggacgacgtgaccctgttcatcagcgcggtccaggaccaggtggtgccggacaacaccctggcctgggtgtgggtgcgcggcctggacgagctgtacgccgagtggtcggaggtcgtgtccacgaacttccgggacgcctccgggccggccatgaccgagatcggcgagcagccgtgggggcgggagttcgccctgcgcgacccggccggcaactgcgtgcacttcgtggccgaggagcaggactgacacgtgctaaaacttcatttttaatttaaaaggatctaggtgaagatcctttttgataatctcatgaccaaaatcccttaacgtgagttttcgttccactgagcgtcagaccccgtagaaaagatcaaaggatcttcttgagatcctttttttctgcgcgtaatctgctgcttgcaaacaaaaaaaccaccgctaccagcggtggtttgtttgccggatcaagagctaccaactctttttccgaaggtaactggcttcagcagagcgcagataccaaatactgttcttctagtgtagccgtagttaggccaccacttcaagaactctgtagcaccgcctacatacctcgctctgctaatcctgttaccagtggctgctgccagtggcgataagtcgtgtcttaccgggttggactcaagacgatagttaccggataaggcgcagcggtcgggctgaacggggggttcgtgcacacagcccagcttggagcgaacgacctacaccgaactgagatacctacagcgtgagctatgagaaagcgccacgcttcccgaagggagaaaggcggacaggtatccggtaagcggcagggtcggaacaggagagcgcacgagggagcttccagggggaaacgcctggtatctttatagtcctgtcgggtttcgccacctctgacttgagcgtcgatttttgtgatgctcgtcaggggggcggagcctatggaaaaacgccagcaacgcggcctttttacggttcctggccttttgctggccttttgctcacatgttctttcctgcgttatcccctgattctgtggataaccgtattaccgcctttgagtgagctgataccgctcgccgcagccgaacgaccgagcgcagcgagtcagtgagcgaggaagcggaagagcgcccaatacgcaaaccgcctctccccgcgcgttggccgattcattaatgcagctggcacgacaggtttcccgactggaaagcgggcagtgagcgcaacgcaattaatgtgagttagctcactcattaggcaccccaggctttacactttatgcttccggctcgtatgttgtgtggaattgtgagcggataacaatttcacacaggaaacagctatgaccatgattacgccaagctatttaggtgacgcgttagaatactcaagctatgcatcaagcttggtaccgagctcggatccactagtaacggccgccagtgtgctggaattcaggggcgcgccctatagatgggatgaagctgctctcgacaaatctgataaaactaaagaaggttagtaatcaatttttacaaaatcatagattatttttttcattgaattatttttatgctataccaagaattgtattttagtatttgttttaactacatataatagaattaactacatataaattaactaaacttaaaataaaaatagatttgtttcctgaaattattttaagaatatatatgtatatatctaaaatcttagacttagatagatttttctatctatctattttggttacttaaaataaataaatttgtataaataattgtatagttatcaaaaattaaaactaatttttttaaagttgttgatatataaaatactaaagatttaacgattaagtatttatttaagtatagaattttgttttttttttaagtttagttatgaagttgttaattatattaaaacaaaacaatatttcgaaattttattatcatattcgaatatattttttttagtgatgatgtatgaattattatcataatttgaaagtttactaaaaaatatatcaacatgaattgtaatatatgagttattaccttaaccaaaattataaattaacattaaatataattatatatgtcatatttagccatacaatgtgtcatcaatattaatagtcatgtcaatattacataatgccaatattatgctacttaaaccccaaatcccctaactcccgttaagtagccaaattcataaatatacttattcgacaaaataaaaaactttaaaatatttactaatccgaccatgcacaagcatccattccctattccattgccacgggataacaatgcaaccnactcctcaaaaaaagaaaaattcaagctcttttgcaaaaaaaaataaaataattttaacacctaaaattttttgtttccaaacttctacagggaacacacataaaagaaaaagaggacgtccactcggatcacgcaacaaaccaaaaggtgtgtcatgactcctaagatataatatttccttattcaaaatcataccattttaaattatgaatgtatttcgtagtccaccagatatgtaatccaccagcgttcaaaccaaagttttatgattgtaagtttaagtgaattataataatatattcttcacggtatcttttcataactaattgagttatcaaacttgatcgcacatgtggctttgataggtgtgacttttatggtatacaattctttcaacctaaaaacattattgttcctcaatatcttacattatgcttgactgcaacaaaatattttctcatctgttttcttcctttaaaccaatttattatcatctatttcctgacattttaatccatccacctatgtcaaaaacttatagaaaatgtcaacttccaaacaaaacataattgaacttcgcaaataaattcttaataatattaaaaaatgttacttaattatttcttcaaccccattttccgcgcgtagcgcggacaaagactctagttaaatatagaagtttccgattctcatcgtataaaacggtgactttggcgggctttcatgtgtaacaaattggtttaacaaaccactgcctagtcgtttagtgtagaatcagcgcatggaactccgattggagcgtgactttcacgtgccggaggcccaccaccacagcgggcgttacgctctaagaatctcgcccacggttttcttcatctgccccccgccaagtgtcttcctcgttcgccacttctcaccaagttacaggaaccctaaaaatggcctttcttcagccccggctataatacacacatgatcctatagtgggttcttccacaagttacatctccttctggattgtacatttcaagtgtttgtgttttttctgcctctgagagaaaatcgcggccgcatggctgctgctcccagtgtgaggacgtttactcgggccgaggttttgaatgccgaggctctgaatgagggcaagaaggatgccgaggcacccttcttgatgatcatcgacaacaaggtgtacgatgtccgcgagttcgtccctgatcatcccggtggaagtgtgattctcacgcacgttggcaaggacggcactgacgtctttgacacttttcaccccgaggctgcttgggagactcttgccaacttttacgttggtgatattgacgagagcgaccgcgatatcaagaatgatgactttgcggccgaggtccgcaagctgcgtaccttgttccagtctcttggttactacgattcttccaaggcatactacgccttcaaggtctcgttcaacctctgcatctggggtttgtcgacggtcattgtggccaagtggggccagacctcgaccctcgccaacgtgctctcggctgcgcttttgggtctgttctggcagcagtgcggatggttggctcacgactttttgcatcaccaggtcttccaggaccgtttctggggtgatcttttcggcgccttcttgggaggtgtctgccagggcttctcgtcctcgtggtggaaggacaagcacaacactcaccacgccgcccccaacgtccacggcgaggatcccgacattgacacccaccctctgttgacctggagtgagcatgcgttggagatgttctcggatgtcccagatgaggagctgacccgcatgtggtcgcgtttcatggtcctgaaccagacctggttttacttccccattctctcgtttgcccgtctctcctggtgcctccagtccattctctttgtgctgcctaacggtcaggcccacaagccctcgggcgcgcgtgtgcccatctcgttggtcgagcagctgtcgcttgcgatgcactggacctggtacctcgccaccatgttcctgttcatcaaggatcccgtcaacatgctggtgtactttttggtgtcgcaggcggtgtgcggaaacttgttggcgatcgtgttctcgctcaaccacaacggtatgcctgtgatctcgaaggaggaggcggtcgatatggatttcttcacgaagcagatcatcacgggtcgtgatgtccacccgggtctatttgccaactggttcacgggtggattgaactatcagatcgagcaccacttgttcccttcgatgcctcgccacaacttttcaaagatccagcctgctgtcgagaccctgtgcaaaaagtacaatgtccgataccacaccaccggtatgatcgagggaactgcagaggtctttagccgtctgaacgaggtctccaaggctgcctccaagatgggtaaggcgcagtaagc

SEQ ID NO: 69 - DNA, 20742 bp, Artificial sequence
  Vector ARALO77
  misc_feature (14134)..(14134): n is a, c, g, or t
  misc_feature (18932)..(18932): n is a, c, g, or t
cgcgcctcgagtgggcggatcccccgggctgcaggaattcactggccgtcgttttacaacgtcgtgactgggaaaaccctggcgttacccaacttaatcgccttgcagcacatccccctttcgccagctggcgtaatagcgaagaggcccgcaccgatcgcccttcccaacagttgcgcagcctgaatggcgaatggatcgatccatcgcgatgtaccttttgttagtcagcctctcgattgctcatcgtcattacacagtaccgaagtttgatcgatctagtaacatagatgacaccgcgcgcgataatttatcctagtttgcgcgctatattttgttttctatcgcgtattaaatgtataattgcgggactctaatcataaaaacccatctcataaataacgtcatgcattacatgttaattattacatgcttaacgtaattcaacagaaattatatgataatcatcgcaagaccggcaacaggattcaatcttaagaaactttattgccaaatgtttgaacgatctgcttcgacgcactccttctttactccaccatctcgtccttattgaaaacgtgggtagcaccaaaacgaatcaagtcgctggaactgaagttaccaatcacgctggatgatttgccagttggattaatcttgcctttccccgcatgaataatattgatgaatgcatgcgtgaggggtagttcgatgttggcaatagctgcaattgccgcgacatcctccaacgagcataattcttcagaaaaatagcgatgttccatgttgtcagggcatgcatgatgcacgttatgaggtgacggtgctaggcagtattccctcaaagtttcatagtcagtatcatattcatcattgcattcctgcaagagagaattgagacgcaatccacacgctgcggcaaccttccggcgttcgtggtctatttgctcttggacgttgcaaacgtaagtgttggatcgatccggggtgggcgaagaactccagcatgagatccccgcgctggaggatcatccagccggcgtcccggaaaacgattccgaagcccaacctttcatagaaggcggcggtggaatcgaaatctcgtgatggcaggttgggcgtcgcttggtcggtcatttcgaaccccagagtcccgctcagaagaactcgtcaagaaggcgatagaaggcgatgcgctgcgaatcgggagcggcgataccgtaaagcacgaggaagcggtcagcccattcgccgccaagctcttcagcaatatcacgggtagccaacgctatgtcctgatagcggtccgccacacccagccggccacagtcgatgaatccagaaaagcggccattttccaccatgatattcggcaagcaggcatcgccatgggtcacgacgagatcctcgccgtcgggcatgcgcgccttgagcctggcgaacagttcggctggcgcgagcccctgatgctcttcgtccagatcatcctgatcgacaagaccggcttccatccgagtacgtgctcgctcgatgcgatgtttcgcttggtggtcgaatgggcaggtagccggatcaagcgtatgcagccgccgcattgcatcagccatgatggatactttctcggcaggagcaaggtgagatgacaggagatcctgccccggcacttcgcccaatagcagccagtcccttcccgcttcagtgacaacgtcgagcacagctgcgcaaggaacgcccgtcgtggccagccacgatagccgcgctgcctcgtcctgcagttcattcagggcaccggacaggtcggtcttgacaaaaagaaccgggcgcccctgcgctgacagccggaacacggcggcatcagagcagccgattgtctgttgtgcccagtcatagccgaatagcctctccacccaagcggccggagaacctgcgtgcaatccatcttgttcaatcatgcgaaacgatccccgcaagcttggagactggtgatttcagcgtgtcctctccaaatgaaatgaacttccttatatagaggaagggtcttgcgaaggatagtgggattgtgcgtcatcccttacgtcagtggagatatcacatcaatccacttgctttgaagacgtggttggaacgtcttctttttccacgatgctcctcgtgggtgggggtccatctttgggaccactgtcggcagaggcatcttcaacgatggcctttcctttatcgcaatgatggcatttgtaggagccaccttccttttccactatcttcacaataaagtgacagatagctgggcaatggaatccgaggaggtttccggatattaccctttgttgaaaagtctcaattgccctttggtcttctgagactgtatctttgatatttttggagtagacaagcgtgtcgtgctccaccatgttgacgaagattttcttcttgtcattgagtcgtaagagactctgtatgaactgttcgccagtctttacggcgagttctgttaggtcctctatttgaatctttgactccatggcctttgattcagtgggaactacctttttagagactccaatctctattacttgccttggtttgtgaagcaagccttgaatcgtccatactggaatagtacttctgatcttgagaaatatatctttctctgtgttcttgatgcagttagtcctgaatcttttgactgcatctttaaccttcttgggaaggtatttgatctcctggagattattgctcgggtagatcgtcttgatgagacctgctgcgtaagcctctctaaccatctgtgggttagcattctttctgaaattgaaaaggctaatcttctcattatcagtggtgaacatggtatcgtcaccttctccgtcgaacttcctgactagatcgtagagatagaggaagtcgtccattgtgatctctggggcaaaggagatctgaattaattcgatatggtggatttatcacaaatgggacccgccgccgacagaggtgtgatgttaggccaggactttgaaaatttgcgcaactatcgtatagtggccgacaaattgacgccgagttgacagactgcctagcatttgagtgaattatgtgaggtaatgggctacactgaattggtagctcaaactgtcagtatttatgtatatgagtgtatattttcgcataatctcagaccaatctgaagatgaaatgggtatctgggaatggcgaaatcaaggcatcgatcgtgaagtttctcatctaagcccccatttggacgtgaatgtagacacgtcgaaataaagatttccgaattagaataatttgtttattgctttcgcctataaatacgacggatcgtaatttgtcgttttatcaaaatgtactttcattttataataacgctgcggacatctacatttttgaattgaaaaaaaattggtaattactctttctttttctccatattgaccatcatactcattgctgatccatgtagatttcccggacatgaagccatttacaattgaatatatcctgccgccgctgccgctttgcacccggtggagcttgcatgttggtttctacgcagaactgagccggttaggcagataatttccattgagaactgagccatgtgcaccttccccccaacacggtgagcgacggggcaacggagtgatccacatgggacttttaaacatcatccgtcggatggcgttgcgagagaagcagtcgatccgtgagatcagccgacgcaccgggcaggcgcgcaacacgatcgcaaagtatttgaacgcaggtacaatcgagccgacgttcacgcggaacgaccaagcaagctagctttaatgcggtagtttatcacagttaaattgctaacgcagtcaggcaccgtgtatgaaatctaacaatgcgctcatcgtcatcctcggcaccgtcaccctggatgctgtaggcataggcttggttatgccggtactgccgggcctcttgcgggatatcgtccattccgacagcatcgccagtcactatggcgtgctgctagcgctatatgcgttgatgcaatttctatgcgcacccgttctcggagcactgtccgaccgctttggccgccgcccagtcctgctcgcttcgctacttggagccactatcgactacgcgatcatggcgaccacacccgtcctgtggtccaacccctccgctgctatagtgcagtcggcttctgacgttcagtgcagccgtcttctgaaaacgacatgtcgcacaagtcctaagttacgcgacaggctgccgccctgcccttttcctggcgttttcttgtcgcgtgttttagtcgcataaagtagaatacttgcgactagaaccggagacattacgccatgaacaagagcgccgccgctggcctgctgggctatgcccgcgtcagcaccgacgaccaggacttgaccaaccaacgggccgaactgcacgcggccggctgcaccaagctgttttccgagaagatcaccggcaccaggcgcgaccgcccggagctggccaggatgcttgaccacctacgccctggcgacgttgtgacagtgaccaggctagaccgcctggcccgcagcacccgcgacctactggacattgccgagcgcatccaggaggccggcgcgggcctgcgtagcctggcagagccgtgggccgacaccaccacgccggccggccgcatggtgttgaccgtgttcgccggcattgccgagttcgagcgttccctaatcatcgaccgcacccggagcgggcgcgaggccgccaaggcccgaggcgtgaagtttggcccccgccctaccctcaccccggcacagatcgcgcacgcccgcgagctgatcgaccaggaaggccgcaccgtgaaagaggcggctgcactgcttggcgtgcatcgctcgaccctgtaccgcgcacttgagcgcagcgaggaagtgacgcccaccgaggccaggcggcgcggtgccttccgtgaggacgcattgaccgaggccgacgccctggcggccgccgagaatgaacgccaagaggaacaagcatgaaaccgcaccaggacggccaggacgaaccgtttttcattaccgaagagatcgaggcggagatgatcgcggccgggtacgtgttcgagccgcccgcgcacgtctcaaccgtgcggctgcatgaaatcctggccggtttgtctgatgccaagctggcggcctggccggccagcttggccgctgaagaaaccgagcgccgccgtctaaaaaggtgatgtgtatttgagtaaaacagcttgcgtcatgcggtcgctgcgtatatgatgcgatgagtaaataaacaaatacgcaagggaacgcatgaagttatcgctgtacttaaccagaaaggcgggtcaggcaagacgaccatcgcaacccatctagcccgcgccctgcaactcgccggggccgatgttctgttagtcgattccgatccccagggcagtgcccgcgattgggcggccgtgcgggaagatcaaccgctaaccgttgtcggcatcgaccgcccgacgattgaccgcgacgtgaaggccatcggccggcgcgacttcgtagtgatcgacggagcgccccaggcggcggacttggctgtgtccgcgatcaaggcagccgacttcgtgctgattccggtgcagccaagcccttacgacatatgggccaccgccgacctggtggagctggttaagcagcgcattgaggtcacggatggaaggctacaagcggcctttgtcgtgtcgcgggcgatcaaaggcacgcgcatcggcggtgaggttgccgaggcgctggccgggtacgagctgcccattcttgagtcccgtatcacgcagcgcgtgagctacccaggcactgccgccgccggcacaaccgttcttgaatcagaacccgagggcgacgctgcccgcgaggtccaggcgctggccgctgaaattaaatcaaaactcatttgagttaatgaggtaaagagaaaatgagcaaaagcacaaacacgctaagtgccggccgtccgagcgcacgcagcagcaaggctgcaacgttggccagcctggcagacacgccagccatgaagcgggtcaactttcagttgccggcggaggatcacaccaagctgaagatgtacgcggtacgccaaggcaagaccattaccgagctgctatctgaatacatcgcgcagctaccagagtaaatgagcaaatgaataaatgagtagatgaattttagcggctaaaggaggcggcatggaaaatcaagaacaaccaggcaccgacgccgtggaatgccccatgtgtggaggaacgggcggttggccaggcgtaagcggctgggttgtctgccggccctgcaatggcactggaacccccaagcccgaggaatcggcgtgagcggtcgcaaaccatccggcccggtacaaatcggcgcggcgctgggtgatgacctggtggagaagttgaaggccgcgcaggccgcccagcggcaacgcatcgaggcagaagcacgccccggtgaatcgtggcaagcggccgctgatcgaatccgcaaagaatcccggcaaccgccggcagccggtgcgccgtcgattaggaagccgcccaagggcgacgagcaaccagattttttcgttccgatgctctatgacgtgggcacccgcgatagtcgcagcatcatggacgtggccgttttccgtctgtcgaagcgtgaccgacgagctggcgaggtgatccgctacgagcttccagacgggcacgtagaggtttccgcagggccggccggcatggccagtgtgtgggattacgacctggtactgatggcggtttcccatctaaccgaatccatgaaccgataccgggaagggaagggagacaagcccggccgcgtgttccgtccacacgttgcggacgtactcaagttctgccggcgagccgatggcggaaagcagaaagacgacctggtagaaacctgcattcggttaaacaccacgcacgttgccatgcagcgtacgaagaaggccaagaacggccgcctggtgacggtatccgagggtgaagccttgattagccgctacaagatcgtaaagagcgaaaccgggcggccggagtacatcgagatcgagctagctgattggatgtaccgcgagatcacagaaggcaagaacccggacgtgctgacggttcaccccgattactttttgatcgatcccggcatcggccgttttctctaccgcctggcacgccgcgccgcaggcaaggcagaagccagatggttgttcaagacgatctacgaacgcagtggcagcgccggagagttcaagaagttctgtttcaccgtgcgcaagctgatcgggtcaaatgacctgccggagtacgatttgaaggaggaggcggggcaggctggcccgatcctagtcatgcgctaccgcaacctgatcgagggcgaagcatccgccggttcctaatgtacggagcagatgctagggcaaattgccctagcaggggaaaaaggtcgaaaaggtctctttcctgtggatagcacgtacattgggaacccaaagccgtacattgggaaccggaacccgtacattgggaacccaaagccgtacattgggaaccggtcacacatgtaagtgactgatataaaagagaaaaaaggcgatttttccgcctaaaactctttaaaacttattaaaactcttaaaacccgcctggcctgtgcataactgtctggccagcgcacagccgaagagctgcaaaaagcgcctacccttcggtcgctgcgctccctacgccccgccgcttcgcgtcggcctatcgcggccgctggccgctcaaaaatggctggcctacggccaggcaatctaccagggcgcggacaagccgcgccgtcgccactcgaccgccggcgcccacatcaaggcaccctgcctcgcgcgtttcggtgatgacggtgaaaacctctgacacatgcagctcccggagacggtcacagcttgtctgtaagcggatgccgggagcagacaagcccgtcagggcgcgtcagcgggtgttggcgggtgtcggggcgcagccatgacccagtcacgtagcgatagcggagtgtatactggcttaactatgcggcatcagagcagattgtactgagagtgcaccatatgcggtgtgaaataccgcacagatgcgtaaggagaaaataccgcatcaggcgctcttccgcttcctcgctcactgactcgctgcgctcggtcgttcggctgcggcgagcggtatcagctcactcaaaggcggtaatacggttatccacagaatcaggggataacgcaggaaagaacatgtgagcaaaaggccagcaaaaggccaggaaccgtaaaaaggccgcgttgctggcgtttttccataggctccgcccccctgacgagcatcacaaaaatcgacgctcaagtcagaggtggcgaaacccgacaggactataaagataccaggcgtttccccctggaagctccctcgtgcgctctcctgttccgaccctgccgcttaccggatacctgtccgcctttctcccttcgggaagcgtggcgctttctcatagctcacgctgtaggtatctcagttcggtgtaggtcgttcgctccaagctgggctgtgtgcacgaaccccccgttcagcccgaccgctgcgccttatccggtaactatcgtcttgagtccaacccggtaagacacgacttatcgccactggcagcagccactggtaacaggattagcagagcgaggtatgtaggcggtgctacagagttcttgaagtggtggcctaactacggctacactagaaggacagtatttggtatctgcgctctgctgaagccagttaccttcggaaaaagagttggtagctcttgatccggcaaacaaaccaccgctggtagcggtggtttttttgtttgcaagcagcagattacgcgcagaaaaaaaggatctcaagaagatcctttgatcttttctacggggtctgacgctcagtggaacgaaaactcacgttaagggattttggtcatgagattatcaaaaaggatcttcacctagatccttttaaattaaaaatgaagttttaaatcaatctaaagtatatatgagtaaacttggtctgacagttaccaatgcttaatcagtgaggcacctatctcagcgatctgtctatttcgttcatccatagttgcctgactccccgtcgtgtagataactacgatacgggagggcttaccatctggccccagtgctgcaatgataccgcgagacccacgctcaccggctccagatttatcagcaataaaccagccagccggaagggccgagcgcagaagtggtcctgcaactttatccgcctccatccagtctattaattgttgccgggaagctagagtaagtagttcgccagttaatagtttgcgcaacgttgttgccattgctacaggcatcgtggtgtcacgctcgtcgtttggtatggcttcattcagctccggttcccaacgatcaaggcgagttacatgatcccccatgttgtgcaaaaaagcggttagctccttcggtcctccgatcgttgtcagaagtaagttggccgcagtgttatcactcatggttatggcagcactgcataattctcttactgtcatgccatccgtaagatgcttttctgtgactggtgagtactcaaccaagtcattctgagaatagtgtatgcggcgaccgagttgctcttgcccggcgtcaacacgggataataccgcgccacatagcagaactttaaaagtgctcatcattggaaaagacctgcaggggggggggggcgctgaggtctgcctcgtgaagaaggtgttgctgactcataccaggcctgaatcgccccatcatccagccagaaagtgagggagccacggttgatgagagctttgttgtaggtggaccagttggtgattttgaacttttgctttgccacggaacggtctgcgttgtcgggaagatgcgtgatctgatccttcaactcagcaaaagttcgatttattcaacaaagccgccgtcccgtcaagtcagcgtaatgctctgccagtgttacaaccaattaaccaattctgattagaaaaactcatcgagcatcaaatgaaactgcaatttattcatatcaggattatcaataccatatttttgaaaaagccgtttctgtaatgaaggagaaaactcaccgaggcagttccataggatggcaagatcctggtatcggtctgcgattccgactcgtccaacatcaatacaacctattaatttcccctcgtcaaaaataaggttatcaagtgagaaatcaccatgagtgacgactgaatccggtgagaatggcaaaagcttatgcatttctttccagacttgttcaacaggccagccattacgctcgtcatcaaaatcactcgcatcaaccaaaccgttattcattcgtgattgcgcctgagcgagacgaaatacgcgatcgctgttaaaaggacaattacaaacaggaatcgaatgcaaccggcgcaggaacactgccagcgcatcaacaatattttcacctgaatcaggatattcttctaatacctggaatgctgttttcccggggatcgcagtggtgagtaaccatgcatcatcaggagtacggataaaatgcttgatggtcggaagaggcataaattccgtcagccagtttagtctgaccatctcatctgtaacatcattggcaacgctacctttgccatgtttcagaaacaactctggcgcatcgggcttcccatacaatcgatagattgtcgcacctgattgcccgacattatcgcgagcccatttatacccatataaatcagcatccatgttggaatttaatcgcggcctcgagcaagacgtttcccgttgaatatggctcataacaccccttgtattactgtttatgtaagcagacagttttattgttcatgatgatatatttttatcttgtgcaatgtaacatcagagattttgagacacaacgtggctttcccccccccccctgcaggtcaattcggtcgatatggctattacgaagaaggctcgtgcgcggagtcccgtgaactttcccacgcaacaagtgaaccgcaccgggtttgccggaggccatttcgttaaaatgcgcagccatggctgcttcgtccagcatggcgtaatactgatcctcgtcttcggctggcggtatattgccgatgggcttcaaaagccgccgtggttgaaccagtctatccattccaaggtagcgaactcgaccgcttcgaagctcctccatggtccacgccgatgaatgacctcggccttgtaaagaccgttgatcgcttctgcgagggcgttgtcgtgctgtcgccgacgcttccgatagatggctcgatacctgcttctgccaaccgctcggaatagcgaaaggacacgtattgaacaccgcgatccgagtgatgcactaggccgccatgagcgggacgccgatcatgatgagcctcctcgagggcatcgaggacaaagcctgcatgtgctgtccggctcgcccgccatccgacaatgcgacgggcgaagacgtcgatcacgaaggccacgtagacgaagccctcccaagtggcgacataagtacggacatgcgcaaaggctttcccggtttgtcgctgatggtgcaagagacgctgaagcgcgatccgatgcgcaggcatctgttcgtcttccgcggtcgtggcggtggcctgatcaaggtcactcgccgaagagctgcatgattggctcgaaaccgagcgggggaaattgtcgcgcagttctcccgtcgccgaggcgataaattacatgctcaagcgatgggatggcattacgtcattcctcgatgacggcccgatttgcctgacgaacaatgctgccgaacgaacgctcagaggctatgtactcggcaggaagtcatggctgtttgccggatcggatcgttgtgctgaacgtgcggcgttcatggcgacactgatcatgagcgccaagctcaataacatcgatccgcaggcctggcttgccgacgtccgcgccgaccttgcggacgctccgatcagcaggcttgagcaacagctgccgtggaactggacatccaagacactgagtgctcaggcggcctgacctgcggccttcaccggatacttaccccattatcgcagattgcgatgaagcatcagcgtcattcagcaatcttgccaaagtatgcaggctcgcgagaatcgacgtgcgaaaccggctggttgcgccaaagatccgcttgcggagcggtcgaacattcatgctgggacttcaagaggtcgagtagaggaagaaccggaaaggttgcaccggaaaatatgcgttcctttggagagcgcctcatggacgtgaacaaatcgcccggaccaaggatgccacggatacaaaagctcgcgaagctcggtcccgtgggtgttctgtcgtctcgttgtacaacgaaatccattcccattccgcgctcaagatggcttcccctcggcagttcatcagggctaaatcaatctagccgacttgtccggtgaaatgggctgcactccaacagaaacaatcaaacaaacatacacagcgacttattcacacgagctcaaattacaacggtatatatcctgccagtcagcatcatcacaccaaaagttaggcccgaatagtttgaaattagaaagctcgcaattgaggtctacaggccaaattcgctcttagccgtacaatattactcaccggtgcgatgccccccatcgtaggtgaaggtggaaattaatgatccatcttgagaccacaggcccacaacagctaccagtttcctcaagggtccaccaaaaacgtaagcgcttacgtacatggtcgataagaaaaggcaatttgtagatgttaacatccaacgtcgctttcagggatcgatccaatacgcaaaccgcctctccccgcgcgttggccgattcattaatgcagctggcacgacaggtttcccgactggaaagcgggcagtgagcgcaacgcaattaatgtgagttagctcactcattaggcaccccaggctttacactttatgcttccggctcgtatgttgtgtggaattgtgagcggataacaatttcacacaggaaacagctatgaccatgattacgccaagcttgcatgcctgcaggtcgactctagaggatctggcgcgccctatagatgggatgaagctgctctcgacaaatctgataaaactaaagaaggttagtaatcaatttttacaaaatcatagattatttttttcattgaattatttttatgctataccaagaattgtattttagtatttgttttaactacatataatagaattaactacatataaattaactaaacttaaaataaaaatagatttgtttcctgaaattattttaagaatatatatgtatatatctaaaatcttagacttagatagatttttctatctatctattttggttacttaaaataaataaatttgtataaataattgtatagttatcaaaaattaaaactaatttttttaaagttgttgatatataaaatactaaagatttaacgattaagtatttatttaagtatagaattttgttttttttttaagtttagttatgaagttgttaattatattaaaacaaaacaatatttcgaaattttattatcatattcgaatatattttttttagtgatgatgtatgaattattatcataatttgaaagtttactaaaaaatatatcaacatgaattgtaatatatgagttattaccttaaccaaaattataaattaacattaaatataattatatatgtcatatttagccatacaatgtgtcatcaatattaatagtcatgtcaatattacataatgccaatattatgctacttaaaccccaaatcccctaactcccgttaagtagccaaattcataaatatacttattcgacaaaataaaaaactttaaaatatttactaatccgaccatgcacaagcatccattccctattccattgccacgggataacaatgcaaccnactcctcaaaaaaagaaaaattcaagctcttttgcaaaaaaaaataaaataattttaacacctaaaattttttgtttccaaacttctacagggaacacacataaaagaaaaagaggacgtccactcggatcacgcaacaaaccaaaaggtgtgtcatgactcctaagatataatatttccttattcaaaatcataccattttaaattatgaatgtatttcgtagtccaccagatatgtaatccaccagcgttcaaaccaaagttttatgattgtaagtttaagtgaattataataatatattcttcacggtatcttttcataactaattgagttatcaaacttgatcgcacatgtggctttgataggtgtgacttttatggtatacaattctttcaacctaaaaacattattgttcctcaatatcttacattatgcttgactgcaacaaaatattttctcatctgttttcttcctttaaaccaatttattatcatctatttcctgacattttaatccatccacctatgtcaaaaacttatagaaaatgtcaacttccaaacaaaacataattgaacttcgcaaataaattcttaataatattaaaaaatgttacttaattatttcttcaaccccattttccgcgcgtagcgcggacaaagactctagttaaatatagaagtttccgattctcatcgtataaaacggtgactttggcgggctttcatgtgtaacaaattggtttaacaaaccactgcctagtcgtttagtgtagaatcagcgcatggaactccgattggagcgtgactttcacgtgccggaggcccaccaccacagcgggcgttacgctctaagaatctcgcccacggttttcttcatctgccccccgccaagtgtcttcctcgttcgccacttctcaccaagttacaggaaccctaaaaatggcctttcttcagccccggctataatacacacatgatcctatagtgggttcttccacaagttacatctccttctggattgtacatttcaagtgtttgtgttttttctgcctctgagagaaaatcgcggccgcatggctgctgctcccagtgtgaggacgtttactcgggccgaggttttgaatgccgaggctctgaatgagggcaagaaggatgccgaggcacccttcttgatgatcatcgacaacaaggtgtacgatgtccgcgagttcgtccctgatcatcccggtggaagtgtgattctcacgcacgttggcaaggacggcactgacgtctttgacacttttcaccccgaggctgcttgggagactcttgccaacttttacgttggtgatattgacgagagcgaccgcgatatcaagaatgatgactttgcggccgaggtccgcaagctgcgtaccttgttccagtctcttggttactacgattcttccaaggcatactacgccttcaaggtctcgttcaacctctgcatctggggtttgtcgacggtcattgtggccaagtggggccagacctcgaccctcgccaacgtgctctcggctgcgcttttgggtctgttctggcagcagtgcggatggttggctcacgactttttgcatcaccaggtcttccaggaccgtttctggggtgatcttttcggcgccttcttgggaggtgtctgccagggcttctcgtcctcgtggtggaaggacaagcacaacactcaccacgccgcccccaacgtccacggcgaggatcccgacattgacacccaccctctgttgacctggagtgagcatgcgttggagatgttctcggatgtcccagatgaggagctgacccgcatgtggtcgcgtttcatggtcctgaaccagacctggttttacttccccattctctcgtttgcccgtctctcctggtgcctccagtccattctctttgtgctgcctaacggtcaggcccacaagccctcgggcgcgcgtgtgcccatctcgttggtcgagcagctgtcgcttgcgatgcactggacctggtacctcgccaccatgttcctgttcatcaaggatcccgtcaacatgctggtgtactttttggtgtcgcaggcggtgtgcggaaacttgttggcgatcgtgttctcgctcaaccacaacggtatgcctgtgatctcgaaggaggaggcggtcgatatggatttcttcacgaagcagatcatcacgggtcgtgatgtccacccgggtctatttgccaactggttcacgggtggattgaactatcagatcgagcaccacttgttcccttcgatgcctcgccacaacttttcaaagatccagcctgctgtcgagaccctgtgcaaaaagtacaatgtccgataccacaccaccggtatgatcgagggaactgcagaggtctttagccgtctgaacgaggtctccaaggctgcctccaagatgggtaaggcgcagtaagcggccgcaagtatgaactaaaatgcatgtaggtgtaagagctcatggagagcatggaatattgtatccgaccatgtaacagtataataactgagctccatctcacttcttctatgaataaacaaaggatgttatgatatattaacactctatctatgcaccttattgttctatgataaatttcctcttattattataaatcatctgaatcgtgacggcttatggaatgcttcaaatagtacaaaaacaaatgtgtactataagactttctaaacaattctaaccttagcattgtgaacgagacataagtgttaagaagacataacaattataatggaagaagtttgtctccatttatatattatatattacccacttatgtattatattaggatgttaaggagacataacaattataaagagagaagtttgtatccatttatatattatatactacccatttatatattatacttatccacttatttaatgtctttataaggtttgatccatgatatttctaatattttagttgatatgtatatgaaagggtactatttgaactctcttactctgtataaaggttggatcatccttaaagtgggtctatttaattttattgcttcttacagataaaaaaaaaattatgagttggtttgataaaatattgaaggatttaaaataataataaataacatataatatatgtatataaatttattataatataacatttatctataaaaaagtaaatattgtcataaatctatacaatcgtttagccttgctggacgaatctcaattatttaaacgagagtaaacatatttgactttttggttatttaacaaattattatttaacactatatgaaatttttttttttatcagcaaagaataaaattaaattaagaaggacaatggtgtcccaatccttatacaaccaacttccacaagaaagtcaagtcagagacaacaaaaaaacaagcaaaggaaattttttaatttgagttgtcttgtttgctgcataatttatgcagtaaaacactacacataacccttttagcagtagagcaatggttgaccgtgtgcttagcttcttttattttatttttttatcagcaaagaataaataaaataaaatgagacacttcagggatgtttcaacaagcttggatcctcgaagagaagggttaataacacacttttttaacatttttaacacaaattttagttatttaaaaatttattaaaaaatttaaaataagaagaggaactctttaaataaatctaacttacaaaatttatgatttttaataagttttcaccaataaaaaatgtcataaaaatatgttaaaaagtatattatcaatattctctttatgataaataaaaagaaaaaaaaaataaaagttaagtgaaaatgagattgaagtgactttaggtgtgtataaatatatcaaccccgccaacaatttatttaatccaaatatattgaagtatattattccatagcctttatttatttatatatttattatataaaagctttatttgttctaggttgttcatgaaatatttttttggttttatctccgttgtaagaaaatcatgtgctttgtgtcgccactcactattgcagctttttcatgcattggtcagattgacggttgattgtatttttgttttttatggttttgtgttatgacttaagtcttcatctctttatctcttcatcaggtttgatggttacctaatatggtccatgggtacatgcatggttaaattaggtggccaactttgttgtgaacgatagaattttttttatattaagtaaactatttttatattatgaaataataataaaaaaaatattttatcattattaacaaaatcatattagttaatttgttaactctataataaaagaaatactgtaacattcacattacatggtaacatctttccaccctttcatttgttttttgtttgatgactttttttcttgtttaaatttatttcccttcttttaaatttggaatacattatcatcatatataaactaaaatactaaaaacaggattacacaaatgataaataataacacaaatatttataaatctagctgcaatatatttaaactagctatatcgatattgtaaaataaaactagctgcattgatactgataaaaaaatatcatgtgctttctggactgatgatgcagtatacttttgacattgcctttattttatttttcagaaaagctttcttagttctgggttcttcattatttgtttcccatctccattgtgaattgaatcatttgcttcgtgtcacaaatacaatttagntaggtacatgcattggtcagattcacggtttattatgtcatgacttaagttcatggtagtacattacctgccacgcatgcattatattggttagatttgataggcaaatttggttgtcaacaatataaatataaataatgtttttatattacgaaataacagtgatcaaaacaaacagttttatctttattaacaagattttgtttttgtttgatgacgttttttaatgtttacgctttcccccttcttttgaatttagaacactttatcatcataaaatcaaatactaaaaaaattacatatttcataaataataacacaaatatttttaaaaaatctgaaataataatgaacaatattacatattatcacgaaaattcattaataaaaatattatataaataaaatgtaatagtagttatatgtaggaaaaaagtactgcacgcataatatatacaaaaagattaaaatgaactattataaataataacactaaattaatggtgaatcatatcaaaataatgaaaaagtaaataaaatttgtaattaacttctatatgtattacacacacaaataataaataatagtaaaaaaaattatgataaatatttaccatctcataagatatttaaaataatgataaaaatatagattattttttatgcaactagctagccaaaaagagaacacgggtatatataaaaagagtacctttaaattctactgtacttcctttattcctgacgtttttatatcaagtggacatacgtgaagattttaattatcagtctaaatatttcattagcacttaatacttttctgttttattcctatcctataagtagtcccgattctcccaacattgcttattcacacaactaactaagaaagtcttccatagccccccaagcggcccatggcctcctccgaggacgtcatcaaggagttcatgcgcttcaaggtgcgcatggagggctccgtgaacggccacgagttcgagatcgagggcgagggcgagggccgcccctacgagggcacccagaccgccaagctgaaggtgaccaagggcggccccctgcccttcgcctgggacatcctgtccccccagttccagtacggctccaaggtgtacgtgaagcaccccgccgacatccccgactacaagaagctgtccttccccgagggcttcaagtgggagcgcgtgatgaacttcgaggacggcggcgtggtgaccgtgacccaggactcctccctgcaggacggctccttcatctacaaggtgaagttcatcggcgtgaacttcccctccgacggccccgtaatgcagaagaagactatgggctgggaggcctccaccgagcgcctgtacccccgcgacggcgtgctgaagggcgagatccacaaggccctgaagctgaaggacggcggccactacctggtggagttcaagtccatctacatggccaagaagcccgtgcagctgcccggctactactacgtggactccaagctggacatcacctcccacaacgaggactacaccatcgtggagcagtacgagcgcgccgagggccgccaccacctgttcctgtagcggccggccgcgacacaagtgtgagagtactaaataaatgctttggttgtacgaaatcattacactaaataaaataatcaaagcttatatatgccttccgctaaggccgaatgcaaagaaattggttctttctcgttatcttttgccacttttactagtacgtattaattactacttaatcatctttgtttacggctcattatatccgtcgacgg

SEQ ID NO: 70 - DNA, 10758 bp, Artificial sequence
  Vector KS431
  misc_feature (2349)..(2349): n is a, c, g, or t
  misc_feature (8498)..(8498): n is a, c, g, or t
ggccgcaagtatgaactaaaatgcatgtaggtgtaagagctcatggagagcatggaatattgtatccgaccatgtaacagtataataactgagctccatctcacttcttctatgaataaacaaaggatgttatgatatattaacactctatctatgcaccttattgttctatgataaatttcctcttattattataaatcatctgaatcgtgacggcttatggaatgcttcaaatagtacaaaaacaaatgtgtactataagactttctaaacaattctaaccttagcattgtgaacgagacataagtgttaagaagacataacaattataatggaagaagtttgtctccatttatatattatatattacccacttatgtattatattaggatgttaaggagacataacaattataaagagagaagtttgtatccatttatatattatatactacccatttatatattatacttatccacttatttaatgtctttataaggtttgatccatgatatttctaatattttagttgatatgtatatgaaagggtactatttgaactctcttactctgtataaaggttggatcatccttaaagtgggtctatttaattttattgcttcttacagataaaaaaaaaattatgagttggtttgataaaatattgaaggatttaaaataataataaataacatataatatatgtatataaatttattataatataacatttatctataaaaaagtaaatattgtcataaatctatacaatcgtttagccttgctggacgaatctcaattatttaaacgagagtaaacatatttgactttttggttatttaacaaattattatttaacactatatgaaatttttttttttatcagcaaagaataaaattaaattaagaaggacaatggtgtcccaatccttatacaaccaacttccacaagaaagtcaagtcagagacaacaaaaaaacaagcaaaggaaattttttaatttgagttgtcttgtttgctgcataatttatgcagtaaaacactacacataacccttttagcagtagagcaatggttgaccgtgtgcttagcttcttttattttatttttttatcagcaaagaataaataaaataaaatgagacacttcagggatgtttcaacaagcttggatcctcgaagagaagggttaataacacacttttttaacatttttaacacaaattttagttatttaaaaatttattaaaaaatttaaaataagaagaggaactctttaaataaatctaacttacaaaatttatgatttttaataagttttcaccaataaaaaatgtcataaaaatatgttaaaaagtatattatcaatattctctttatgataaataaaaagaaaaaaaaaataaaagttaagtgaaaatgagattgaagtgactttaggtgtgtataaatatatcaaccccgccaacaatttatttaatccaaatatattgaagtatattattccatagcctttatttatttatatatttattatataaaagctttatttgttctaggttgttcatgaaatatttttttggttttatctccgttgtaagaaaatcatgtgctttgtgtcgccactcactattgcagctttttcatgcattggtcagattgacggttgattgtatttttgttttttatggttttgtgttatgacttaagtcttcatctctttatctcttcatcaggtttgatggttacctaatatggtccatgggtacatgcatggttaaattaggtggccaactttgttgtgaacgatagaattttttttatattaagtaaactatttttatattatgaaataataataaaaaaaatattttatcattattaacaaaatcatattagttaatttgttaactctataataaaagaaatactgtaacattcacattacatggtaacatctttccaccctttcatttgttttttgtttgatgactttttttcttgtttaaatttatttcccttcttttaaatttggaatacattatcatcatatataaactaaaatactaaaaacaggattacacaaatgataaataataacacaaatatttataaatctagctgcaatatatttaaactagctatatcgatattgtaaaataaaactagctgcattgatactgataaaaaaatatcatgtgctttctggactgatgatgcagtatacttttgacattgcctttattttatttttcagaaaagctttcttagttctgggttcttcattatttgtttcccatctccattgtgaattgaatcatttgcttcgtgtcacaaatacaatttagntaggtacatgcattggtcagattcacggtttattatgtcatgacttaagttcatggtagtacattacctgccacgcatgcattatattggttagatttgataggcaaatttggttgtcaacaatataaatataaataatgtttttatattacgaaataacagtgatcaaaacaaacagttttatctttattaacaagattttgtttttgtttgatgacgttttttaatgtttacgctttcccccttcttttgaatttagaacactttatcatcataaaatcaaatactaaaaaaattacatatttcataaataataacacaaatatttttaaaaaatctgaaataataatgaacaatattacatattatcacgaaaattcattaataaaaatattatataaataaaatgtaatagtagttatatgtaggaaaaaagtactgcacgcataatatatacaaaaagattaaaatgaactattataaataataacactaaattaatggtgaatcatatcaaaataatgaaaaagtaaataaaatttgtaattaacttctatatgtattacacacacaaataataaataatagtaaaaaaaattatgataaatatttaccatctcataagatatttaaaataatgataaaaatatagattattttttatgcaactagctagccaaaaagagaacacgggtatatataaaaagagtacctttaaattctactgtacttcctttattcctgacgtttttatatcaagtggacatacgtgaagattttaattatcagtctaaatatttcattagcacttaatacttttctgttttattcctatcctataagtagtcccgattctcccaacattgcttattcacacaactaactaagaaagtcttccatagccccccaagcggcccatggcctcctccgaggacgtcatcaaggagttcatgcgcttcaaggtgcgcatggagggctccgtgaacggccacgagttcgagatcgagggcgagggcgagggccgcccctacgagggcacccagaccgccaagctgaaggtgaccaagggcggccccctgcccttcgcctgggacatcctgtccccccagttccagtacggctccaaggtgtacgtgaagcaccccgccgacatccccgactacaagaagctgtccttccccgagggcttcaagtgggagcgcgtgatgaacttcgaggacggcggcgtggtgaccgtgacccaggactcctccctgcaggacggctccttcatctacaaggtgaagttcatcggcgtgaacttcccctccgacggccccgtaatgcagaagaagactatgggctgggaggcctccaccgagcgcctgtacccccgcgacggcgtgctgaagggcgagatccacaaggccctgaagctgaaggacggcggccactacctggtggagttcaagtccatctacatggccaagaagcccgtgcagctgcccggctactactacgtggactccaagctggacatcacctcccacaacgaggactacaccatcgtggagcagtacgagcgcgccgagggccgccaccacctgttcctgtagcggccggccgcgacacaagtgtgagagtactaaataaatgctttggttgtacgaaatcattacactaaataaaataatcaaagcttatatatgccttccgctaaggccgaatgcaaagaaattggttctttctcgttatcttttgccacttttactagtacgtattaattactacttaatcatctttgtttacggctcattatatccgtcgacggcgcgccgctctagagggcccaattcgccctatagtgagtcgtattacaattcactggccgtcgttttacaacgtcgtgactgggaaaaccctggcgttacccaacttaatcgccttgcagcacatccccctttcgccagctggcgtaatagcgaagaggcccgcaccgatcgcccttcccaacagttgcgcagcctatacgtacggcagtttaaggtttacacctataaaagagagagccgttatcgtctgtttgtggatgtacagagtgatattattgacacgccggggcgacggatggtgatccccctggccagtgcacgtctgctgtcagataaagtctcccgtgaactttacccggtggtgcatatcggggatgaaagctggcgcatgatgaccaccgatatggccagtgtgccggtctccgttatcggggaagaagtggctgatctcagccaccgcgaaaatgacatcaaaaacgccattaacctgatgttctggggaatataaatgtcaggcatgagattatcaaaaaggatcttcacctagatccttttcacgtagaaagccagtccgcagaaacggtgctgaccccggatgaatgtcagctactgggctatctggacaagggaaaacgcaagcgcaaagagaaagcaggtagcttgcagtgggcttacatggcgatagctagactgggcggttttatggacagcaagcgaaccggaattgccagctggggcgccctctggtaaggttgggaagccctgcaaagtaaactggatggctttcttgccgccaaggatctgatggcgcaggggatcaagctctgatcaagagacaggatgaggatcgtttcgcatgattgaacaagatggattgcacgcaggttctccggccgcttgggtggagaggctattcggctatgactgggcacaacagacaatcggctgctctgatgccgccgtgttccggctgtcagcgcaggggcgcccggttctttttgtcaagaccgacctgtccggtgccctgaatgaactgcaagacgaggcagcgcggctatcgtggctggccacgacgggcgttccttgcgcagctgtgctcgacgttgtcactgaagcgggaagggactggctgctattgggcgaagtgccggggcaggatctcctgtcatctcaccttgctcctgccgagaaagtatccatcatggctgatgcaatgcggcggctgcatacgcttgatccggctacctgcccattcgaccaccaagcgaaacatcgcatcgagcgagcacgtactcggatggaagccggtcttgtcgatcaggatgatctggacgaagagcatcaggggctcgcgccagccgaactgttcgccaggctcaaggcgagcatgcccgacggcgaggatctcgtcgtgacccatggcgatgcctgcttgccgaatatcatggtggaaaatggccgcttttctggattcatcgactgtggccggctgggtgtggcggaccgctatcaggacatagcgttggctacccgtgatattgctgaagagcttggcggcgaatgggctgaccgcttcctcgtgctttacggtatcgccgctcccgattcgcagcgcatcgccttctatcgccttcttgacgagttcttctgaattattaacgcttacaatttcctgatgcggtattttctccttacgcatctgtgcggtatttcacaccgcatcaggtggcacttttcggggaaatgtgcgcggaacccctatttgtttatttttctaaatacattcaaatatgtatccgctcatgagacaataaccctgataaatgcttcaataatagcacgtgaggagggccaccatggccaagttgaccagtgccgttccggtgctcaccgcgcgcgacgtcgccggagcggtcgagttctggaccgaccggctcgggttctcccgggacttcgtggaggacgacttcgccggtgtggtccgggacgacgtgaccctgttcatcagcgcggtccaggaccaggtggtgccggacaacaccctggcctgggtgtgggtgcgcggcctggacgagctgtacgccgagtggtcggaggtcgtgtccacgaacttccgggacgcctccgggccggccatgaccgagatcggcgagcagccgtgggggcgggagttcgccctgcgcgacccggccggcaactgcgtgcacttcgtggccgaggagcaggactgacacgtgctaaaacttcatttttaatttaaaaggatctaggtgaagatcctttttgataatctcatgaccaaaatcccttaacgtgagttttcgttccactgagcgtcagaccccgtagaaaagatcaaaggatcttcttgagatcctttttttctgcgcgtaatctgctgcttgcaaacaaaaaaaccaccgctaccagcggtggtttgtttgccggatcaagagctaccaactctttttccgaaggtaactggcttcagcagagcgcagataccaaatactgttcttctagtgtagccgtagttaggccaccacttcaagaactctgtagcaccgcctacatacctcgctctgctaatcctgttaccagtggctgctgccagtggcgataagtcgtgtcttaccgggttggactcaagacgatagttaccggataaggcgcagcggtcgggctgaacggggggttcgtgcacacagcccagcttggagcgaacgacctacaccgaactgagatacctacagcgtgagctatgagaaagcgccacgcttcccgaagggagaaaggcggacaggtatccggtaagcggcagggtcggaacaggagagcgcacgagggagcttccagggggaaacgcctggtatctttatagtcctgtcgggtttcgccacctctgacttgagcgtcgatttttgtgatgctcgtcaggggggcggagcctatggaaaaacgccagcaacgcggcctttttacggttcctggccttttgctggccttttgctcacatgttctttcctgcgttatcccctgattctgtggataaccgtattaccgcctttgagtgagctgataccgctcgccgcagccgaacgaccgagcgcagcgagtcagtgagcgaggaagcggaagagcgcccaatacgcaaaccgcctctccccgcgcgttggccgattcattaatgcagctggcacgacaggtttcccgactggaaagcgggcagtgagcgcaacgcaattaatgtgagttagctcactcattaggcaccccaggctttacactttatgcttccggctcgtatgttgtgtggaattgtgagcggataacaatttcacacaggaaacagctatgaccatgattacgccaagctatttaggtgacgcgttagaatactcaagctatgcatcaagcttggtaccgagctcggatccactagtaacggccgccagtgtgctggaattcaggggcgcgccctatagatgggatgaagctgctctcgacaaatctgataaaactaaagaaggttagtaatcaatttttacaaaatcatagattatttttttcattgaattatttttatgctataccaagaattgtattttagtatttgttttaactacatataatagaattaactacatataaattaactaaacttaaaataaaaatagatttgtttcctgaaattattttaagaatatatatgtatatatctaaaatcttagacttagatagatttttctatctatctattttggttacttaaaataaataaatttgtataaataattgtatagttatcaaaaattaaaactaatttttttaaagttgttgatatataaaatactaaagatttaacgattaagtatttatttaagtatagaattttgttttttttttaagtttagttatgaagttgttaattatattaaaacaaaacaatatttcgaaattttattatcatattcgaatatattttttttagtgatgatgtatgaattattatcataatttgaaagtttactaaaaaatatatcaacatgaattgtaatatatgagttattaccttaaccaaaattataaattaacattaaatataattatatatgtcatatttagccatacaatgtgtcatcaatattaatagtcatgtcaatattacataatgccaatattatgctacttaaaccccaaatcccctaactcccgttaagtagccaaattcataaatatacttattcgacaaaataaaaaactttaaaatatttactaatccgaccatgcacaagcatccattccctattccattgccacgggataacaatgcaaccnactcctcaaaaaaagaaaaattcaagctcttttgcaaaaaaaaataaaataattttaacacctaaaattttttgtttccaaacttctacagggaacacacataaaagaaaaagaggacgtccactcggatcacgcaacaaaccaaaaggtgtgtcatgactcctaagatataatatttccttattcaaaatcataccattttaaattatgaatgtatttcgtagtccaccagatatgtaatccaccagcgttcaaaccaaagttttatgattgtaagtttaagtgaattataataatatattcttcacggtatcttttcataactaattgagttatcaaacttgatcgcacatgtggctttgataggtgtgacttttatggtatacaattctttcaacctaaaaacattattgttcctcaatatcttacattatgcttgactgcaacaaaatattttctcatctgttttcttcctttaaaccaatttattatcatctatttcctgacattttaatccatccacctatgtcaaaaacttatagaaaatgtcaacttccaaacaaaacataattgaacttcgcaaataaattcttaataatattaaaaaatgttacttaattatttcttcaaccccattttccgcgcgtagcgcggacaaagactctagttaaatatagaagtttccgattctcatcgtataaaacggtgactttggcgggctttcatgtgtaacaaattggtttaacaaaccactgcctagtcgtttagtgtagaatcagcgcatggaactccgattggagcgtgactttcacgtgccggaggcccaccaccacagcgggcgttacgctctaagaatctcgcccacggttttcttcatctgccccccgccaagtgtcttcctcgttcgccacttctcaccaagttacaggaaccctaaaaatggcctttcttcagccccggctataatacacacatgatcctatagtgggttcttccacaagttacatctccttctggattgtacatttcaagtgtttgtgttttttctgcctctgagagaaaatcgcggccgcatggagagatctcaacggcagtctcctccgccaccgtcgccgtcctcctcctcgtcctccgtctccgcggacaccgtcctcgtccctcccggaaagaggcggagggcggcgacggccaaggccggcgccgagcctaataagaggatccgcaaggaccccgccgccgccgccgcggggaagaggagctccgtctacaggggagtcaccaggcacaggtggacgggcaggttcgaggcgcatctctgggacaagcactgcctcgccgcgctccacaacaagaagaaaggcaggcaagtctacctgggggcgtatgacagcgaggaggcagctgctcgtgcctatgacctcgcagctctcaagtactggggtcctgagactctgctcaacttccctgtggaggattactccagcgagatgccggagatggaggccgtgtcccgggaggagtacctggcctccctccgccgcaggagcagcggcttctccaggggcgtctccaagtacagaggcgtcgccaggcatcaccacaacgggaggtgggaggcacggattgggcgagtctttgggaacaagtacctctacttgggaacatttgacactcaagaagaggcagccaaggcctatgaccttgcggccattgaataccgtggcgtcaatgctgtaaccaacttcgacatcagctgctacctggaccacccgctgttcctggcacagctccaacaggagccacaggtggtgccggcactcaaccaagaacctcaacctgatcagagcgaaaccggaactacagagcaagagccggagtcaagcgaagccaagacaccggatggcagtgcagaacccgatgagaacgcggtgcctgacgacaccgcggagcccctcaccacagtcgacgacagcatcgaagagggcttgtggagcccttgcatggattacgagctagacaccatgtcgagaccaaactttggcagctcaatcaatctgagcgagtggttcgctgacgcagacttcgactgcaacatcggatgcctgttcgatgggtgttctgcggctgacgaaggaagcaaggatggtgtaggtctggcagatttcagtctgtttgaggcaggtgatgtccagctgaaggatgttctttcggatatggaagaggggatacaacctccagcgatgatcagtgtgtgcaacgc

SEQ ID NO: 71 - DNA, 20553 bp, Artificial sequence
  Vector ARALO79
  misc_feature (14134)..(14134): n is a, c, g, or t
  misc_feature (18743)..(18743): n is a, c, g, or t
cgcgcctcgagtgggcggatcccccgggctgcaggaattcactggccgtcgttttacaacgtcgtgactgggaaaaccctggcgttacccaacttaatcgccttgcagcacatccccctttcgccagctggcgtaatagcgaagaggcccgcaccgatcgcccttcccaacagttgcgcagcctgaatggcgaatggatcgatccatcgcgatgtaccttttgttagtcagcctctcgattgctcatcgtcattacacagtaccgaagtttgatcgatctagtaacatagatgacaccgcgcgcgataatttatcctagtttgcgcgctatattttgttttctatcgcgtattaaatgtataattgcgggactctaatcataaaaacccatctcataaataacgtcatgcattacatgttaattattacatgcttaacgtaattcaacagaaattatatgataatcatcgcaagaccggcaacaggattcaatcttaagaaactttattgccaaatgtttgaacgatctgcttcgacgcactccttctttactccaccatctcgtccttattgaaaacgtgggtagcaccaaaacgaatcaagtcgctggaactgaagttaccaatcacgctggatgatttgccagttggattaatcttgcctttccccgcatgaataatattgatgaatgcatgcgtgaggggtagttcgatgttggcaatagctgcaattgccgcgacatcctccaacgagcataattcttcagaaaaatagcgatgttccatgttgtcagggcatgcatgatgcacgttatgaggtgacggtgctaggcagtattccctcaaagtttcatagtcagtatcatattcatcattgcattcctgcaagagagaattgagacgcaatccacacgctgcggcaaccttccggcgttcgtggtctatttgctcttggacgttgcaaacgtaagtgttggatcgatccggggtgggcgaagaactccagcatgagatccccgcgctggaggatcatccagccggcgtcccggaaaacgattccgaagcccaacctttcatagaaggcggcggtggaatcgaaatctcgtgatggcaggttgggcgtcgcttggtcggtcatttcgaaccccagagtcccgctcagaagaactcgtcaagaaggcgatagaaggcgatgcgctgcgaatcgggagcggcgataccgtaaagcacgaggaagcggtcagcccattcgccgccaagctcttcagcaatatcacgggtagccaacgctatgtcctgatagcggtccgccacacccagccggccacagtcgatgaatccagaaaagcggccattttccaccatgatattcggcaagcaggcatcgccatgggtcacgacgagatcctcgccgtcgggcatgcgcgccttgagcctggcgaacagttcggctggcgcgagcccctgatgctcttcgtccagatcatcctgatcgacaagaccggcttccatccgagtacgtgctcgctcgatgcgatgtttcgcttggtggtcgaatgggcaggtagccggatcaagcgtatgcagccgccgcattgcatcagccatgatggatactttctcggcaggagcaaggtgagatgacaggagatcctgccccggcacttcgcccaatagcagccagtcccttcccgcttcagtgacaacgtcgagcacagctgcgcaaggaacgcccgtcgtggccagccacgatagccgcgctgcctcgtcctgcagttcattcagggcaccggacaggtcggtcttgacaaaaagaaccgggcgcccctgcgctgacagccggaacacggcggcatcagagcagccgattgtctgttgtgcccagtcatagccgaatagcctctccacccaagcggccggagaacctgcgtgcaatccatcttgttcaatcatgcgaaacgatccccgcaagcttggagactggtgatttcagcgtgtcctctccaaatgaaatgaacttccttatatagaggaagggtcttgcgaaggatagtgggattgtgcgtcatcccttacgtcagtggagatatcacatcaatccacttgctttgaagacgtggttggaacgtcttctttttccacgatgctcctcgtgggtgggggtccatctttgggaccactgtcggcagaggcatcttcaacgatggcctttcctttatcgcaatgatggcatttgtaggagccaccttccttttccactatcttcacaataaagtgacagatagctgggcaatggaatccgaggaggtttccggatattaccctttgttgaaaagtctcaattgccctttggtcttctgagactgtatctttgatatttttggagtagacaagcgtgtcgtgctccaccatgttgacgaagattttcttcttgtcattgagtcgtaagagactctgtatgaactgttcgccagtctttacggcgagttctgttaggtcctctatttgaatctttgactccatggcctttgattcagtgggaactacctttttagagactccaatctctattacttgccttggtttgtgaagcaagccttgaatcgtccatactggaatagtacttctgatcttgagaaatatatctttctctgtgttcttgatgcagttagtcctgaatcttttgactgcatctttaaccttcttgggaaggtatttgatctcctggagattattgctcgggtagatcgtcttgatgagacctgctgcgtaagcctctctaaccatctgtgggttagcattctttctgaaattgaaaaggctaatcttctcattatcagtggtgaacatggtatcgtcaccttctccgtcgaacttcctgactagatcgtagagatagaggaagtcgtccattgtgatctctggggcaaaggagatctgaattaattcgatatggtggatttatcacaaatgggacccgccgccgacagaggtgtgatgttaggccaggactttgaaaatttgcgcaactatcgtatagtggccgacaaattgacgccgagttgacagactgcctagcatttgagtgaattatgtgaggtaatgggctacactgaattggtagctcaaactgtcagtatttatgtatatgagtgtatattttcgcataatctcagaccaatctgaagatgaaatgggtatctgggaatggcgaaatcaaggcatcgatcgtgaagtttctcatctaagcccccatttggacgtgaatgtagacacgtcgaaataaagatttccgaattagaataatttgtttattgctttcgcctataaatacgacggatcgtaatttgtcgttttatcaaaatgtactttcattttataataacgctgcggacatctacatttttgaattgaaaaaaaattggtaattactctttctttttctccatattgaccatcatactcattgctgatccatgtagatttcccggacatgaagccatttacaattgaatatatcctgccgccgctgccgctttgcacccggtggagcttgcatgttggtttctacgcagaactgagccggttaggcagataatttccattgagaactgagccatgtgcaccttccccccaacacggtgagcgacggggcaacggagtgatccacatgggacttttaaacatcatccgtcggatggcgttgcgagagaagcagtcgatccgtgagatcagccgacgcaccgggcaggcgcgcaacacgatcgcaaagtatttgaacgcaggtacaatcgagccgacgttcacgcggaacgaccaagcaagctagctttaatgcggtagtttatcacagttaaattgctaacgcagtcaggcaccgtgtatgaaatctaacaatgcgctcatcgtcatcctcggcaccgtcaccctggatgctgtaggcataggcttggttatgccggtactgccgggcctcttgcgggatatcgtccattccgacagcatcgccagtcactatggcgtgctgctagcgctatatgcgttgatgcaatttctatgcgcacccgttctcggagcactgtccgaccgctttggccgccgcccagtcctgctcgcttcgctacttggagccactatcgactacgcgatcatggcgaccacacccgtcctgtggtccaacccctccgctgctatagtgcagtcggcttctgacgttcagtgcagccgtcttctgaaaacgacatgtcgcacaagtcctaagttacgcgacaggctgccgccctgcccttttcctggcgttttcttgtcgcgtgttttagtcgcataaagtagaatacttgcgactagaaccggagacattacgccatgaacaagagcgccgccgctggcctgctgggctatgcccgcgtcagcaccgacgaccaggacttgaccaaccaacgggccgaactgcacgcggccggctgcaccaagctgttttccgagaagatcaccggcaccaggcgcgaccgcccggagctggccaggatgcttgaccacctacgccctggcgacgttgtgacagtgaccaggctagaccgcctggcccgcagcacccgcgacctactggacattgccgagcgcatccaggaggccggcgcgggcctgcgtagcctggcagagccgtgggccgacaccaccacgccggccggccgcatggtgttgaccgtgttcgccggcattgccgagttcgagcgttccctaatcatcgaccgcacccggagcgggcgcgaggccgccaaggcccgaggcgtgaagtttggcccccgccctaccctcaccccggcacagatcgcgcacgcccgcgagctgatcgaccaggaaggccgcaccgtgaaagaggcggctgcactgcttggcgtgcatcgctcgaccctgtaccgcgcacttgagcgcagcgaggaagtgacgcccaccgaggccaggcggcgcggtgccttccgtgaggacgcattgaccgaggccgacgccctggcggccgccgagaatgaacgccaagaggaacaagcatgaaaccgcaccaggacggccaggacgaaccgtttttcattaccgaagagatcgaggcggagatgatcgcggccgggtacgtgttcgagccgcccgcgcacgtctcaaccgtgcggctgcatgaaatcctggccggtttgtctgatgccaagctggcggcctggccggccagcttggccgctgaagaaaccgagcgccgccgtctaaaaaggtgatgtgtatttgagtaaaacagcttgcgtcatgcggtcgctgcgtatatgatgcgatgagtaaataaacaaatacgcaagggaacgcatgaagttatcgctgtacttaaccagaaaggcgggtcaggcaagacgaccatcgcaacccatctagcccgcgccctgcaactcgccggggccgatgttctgttagtcgattccgatccccagggcagtgcccgcgattgggcggccgtgcgggaagatcaaccgctaaccgttgtcggcatcgaccgcccgacgattgaccgcgacgtgaaggccatcggccggcgcgacttcgtagtgatcgacggagcgccccaggcggcggacttggctgtgtccgcgatcaaggcagccgacttcgtgctgattccggtgcagccaagcccttacgacatatgggccaccgccgacctggtggagctggttaagcagcgcattgaggtcacggatggaaggctacaagcggcctttgtcgtgtcgcgggcgatcaaaggcacgcgcatcggcggtgaggttgccgaggcgctggccgggtacgagctgcccattcttgagtcccgtatcacgcagcgcgtgagctacccaggcactgccgccgccggcacaaccgttcttgaatcagaacccgagggcgacgctgcccgcgaggtccaggcgctggccgctgaaattaaatcaaaactcatttgagttaatgaggtaaagagaaaatgagcaaaagcacaaacacgctaagtgccggccgtccgagcgcacgcagcagcaaggctgcaacgttggccagcctggcagacacgccagccatgaagcgggtcaactttcagttgccggcggaggatcacaccaagctgaagatgtacgcggtacgccaaggcaagaccattaccgagctgctatctgaatacatcgcgcagctaccagagtaaatgagcaaatgaataaatgagtagatgaattttagcggctaaaggaggcggcatggaaaatcaagaacaaccaggcaccgacgccgtggaatgccccatgtgtggaggaacgggcggttggccaggcgtaagcggctgggttgtctgccggccctgcaatggcactggaacccccaagcccgaggaatcggcgtgagcggtcgcaaaccatccggcccggtacaaatcggcgcggcgctgggtgatgacctggtggagaagttgaaggccgcgcaggccgcccagcggcaacgcatcgaggcagaagcacgccccggtgaatcgtggcaagcggccgctgatcgaatccgcaaagaatcccggcaaccgccggcagccggtgcgccgtcgattaggaagccgcccaagggcgacgagcaaccagattttttcgttccgatgctctatgacgtgggcacccgcgatagtcgcagcatcatggacgtggccgttttccgtctgtcgaagcgtgaccgacgagctggcgaggtgatccgctacgagcttccagacgggcacgtagaggtttccgcagggccggccggcatggccagtgtgtgggattacgacctggtactgatggcggtttcccatctaaccgaatccatgaaccgataccgggaagggaagggagacaagcccggccgcgtgttccgtccacacgttgcggacgtactcaagttctgccggcgagccgatggcggaaagcagaaagacgacctggtagaaacctgcattcggttaaacaccacgcacgttgccatgcagcgtacgaagaaggccaagaacggccgcctggtgacggtatccgagggtgaagccttgattagccgctacaagatcgtaaagagcgaaaccgggcggccggagtacatcgagatcgagctagctgattggatgtaccgcgagatcacagaaggcaagaacccggacgtgctgacggttcaccccgattactttttgatcgatcccggcatcggccgttttctctaccgcctggcacgccgcgccgcaggcaaggcagaagccagatggttgttcaagacgatctacgaacgcagtggcagcgccggagagttcaagaagttctgtttcaccgtgcgcaagctgatcgggtcaaatgacctgccggagtacgatttgaaggaggaggcggggcaggctggcccgatcctagtcatgcgctaccgcaacctgatcgagggcgaagcatccgccggttcctaatgtacggagcagatgctagggcaaattgccctagcaggggaaaaaggtcgaaaaggtctctttcctgtggatagcacgtacattgggaacccaaagccgtacattgggaaccggaacccgtacattgggaacccaaagccgtacattgggaaccggtcacacatgtaagtgactgatataaaagagaaaaaaggcgatttttccgcctaaaactctttaaaacttattaaaactcttaaaacccgcctggcctgtgcataactgtctggccagcgcacagccgaagagctgcaaaaagcgcctacccttcggtcgctgcgctccctacgccccgccgcttcgcgtcggcctatcgcggccgctggccgctcaaaaatggctggcctacggccaggcaatctaccagggcgcggacaagccgcgccgtcgccactcgaccgccggcgcccacatcaaggcaccctgcctcgcgcgtttcggtgatgacggtgaaaacctctgacacatgcagctcccggagacggtcacagcttgtctgtaagcggatgccgggagcagacaagcccgtcagggcgcgtcagcgggtgttggcgggtgtcggggcgcagccatgacccagtcacgtagcgatagcggagtgtatactggcttaactatgcggcatcagagcagattgtactgagagtgcaccatatgcggtgtgaaataccgcacagatgcgtaaggagaaaataccgcatcaggcgctcttccgcttcctcgctcactgactcgctgcgctcggtcgttcggctgcggcgagcggtatcagctcactcaaaggcggtaatacggttatccacagaatcaggggataacgcaggaaagaacatgtgagcaaaaggccagcaaaaggccaggaaccgtaaaaaggccgcgttgctggcgtttttccataggctccgcccccctgacgagcatcacaaaaatcgacgctcaagtcagaggtggcgaaacccgacaggactataaagataccaggcgtttccccctggaagctccctcgtgcgctctcctgttccgaccctgccgcttaccggatacctgtccgcctttctcccttcgggaagcgtggcgctttctcatagctcacgctgtaggtatctcagttcggtgtaggtcgttcgctccaagctgggctgtgtgcacgaaccccccgttcagcccgaccgctgcgccttatccggtaactatcgtcttgagtccaacccggtaagacacgacttatcgccactggcagcagccactggtaacaggattagcagagcgaggtatgtaggcggtgctacagagttcttgaagtggtggcctaactacggctacactagaaggacagtatttggtatctgcgctctgctgaagccagttaccttcggaaaaagagttggtagctcttgatccggcaaacaaaccaccgctggtagcggtggtttttttgtttgcaagcagcagattacgcgcagaaaaaaaggatctcaagaagatcctttgatcttttctacggggtctgacgctcagtggaacgaaaactcacgttaagggattttggtcatgagattatcaaaaaggatcttcacctagatccttttaaattaaaaatgaagttttaaatcaatctaaagtatatatgagtaaacttggtctgacagttaccaatgcttaatcagtgaggcacctatctcagcgatctgtctatttcgttcatccatagttgcctgactccccgtcgtgtagataactacgatacgggagggcttaccatctggccccagtgctgcaatgataccgcgagacccacgctcaccggctccagatttatcagcaataaaccagccagccggaagggccgagcgcagaagtggtcctgcaactttatccgcctccatccagtctattaattgttgccgggaagctagagtaagtagttcgccagttaatagtttgcgcaacgttgttgccattgctacaggcatcgtggtgtcacgctcgtcgtttggtatggcttcattcagctccggttcccaacgatcaaggcgagttacatgatcccccatgttgtgcaaaaaagcggttagctccttcggtcctccgatcgttgtcagaagtaagttggccgcagtgttatcactcatggttatggcagcactgcataattctcttactgtcatgccatccgtaagatgcttttctgtgactggtgagtactcaaccaagtcattctgagaatagtgtatgcggcgaccgagttgctcttgcccggcgtcaacacgggataataccgcgccacatagcagaactttaaaagtgctcatcattggaaaagacctgcaggggggggggggcgctgaggtctgcctcgtgaagaaggtgttgctgactcataccaggcctgaatcgccccatcatccagccagaaagtgagggagccacggttgatgagagctttgttgtaggtggaccagttggtgattttgaacttttgctttgccacggaacggtctgcgttgtcgggaagatgcgtgatctgatccttcaactcagcaaaagttcgatttattcaacaaagccgccgtcccgtcaagtcagcgtaatgctctgccagtgttacaaccaattaaccaattctgattagaaaaactcatcgagcatcaaatgaaactgcaatttattcatatcaggattatcaataccatatttttgaaaaagccgtttctgtaatgaaggagaaaactcaccgaggcagttccataggatggcaagatcctggtatcggtctgcgattccgactcgtccaacatcaatacaacctattaatttcccctcgtcaaaaataaggttatcaagtgagaaatcaccatgagtgacgactgaatccggtgagaatggcaaaagcttatgcatttctttccagacttgttcaacaggccagccattacgctcgtcatcaaaatcactcgcatcaaccaaaccgttattcattcgtgattgcgcctgagcgagacgaaatacgcgatcgctgttaaaaggacaattacaaacaggaatcgaatgcaaccggcgcaggaacactgccagcgcatcaacaatattttcacctgaatcaggatattcttctaatacctggaatgctgttttcccggggatcgcagtggtgagtaaccatgcatcatcaggagtacggataaaatgcttgatggtcggaagaggcataaattccgtcagccagtttagtctgaccatctcatctgtaacatcattggcaacgctacctttgccatgtttcagaaacaactctggcgcatcgggcttcccatacaatcgatagattgtcgcacctgattgcccgacattatcgcgagcccatttatacccatataaatcagcatccatgttggaatttaatcgcggcctcgagcaagacgtttcccgttgaatatggctcataacaccccttgtattactgtttatgtaagcagacagttttattgttcatgatgatatatttttatcttgtgcaatgtaacatcagagattttgagacacaacgtggctttcccccccccccctgcaggtcaattcggtcgatatggctattacgaagaaggctcgtgcgcggagtcccgtgaactttcccacgcaacaagtgaaccgcaccgggtttgccggaggccatttcgttaaaatgcgcagccatggctgcttcgtccagcatggcgtaatactgatcctcgtcttcggctggcggtatattgccgatgggcttcaaaagccgccgtggttgaaccagtctatccattccaaggtagcgaactcgaccgcttcgaagctcctccatggtccacgccgatgaatgacctcggccttgtaaagaccgttgatcgcttctgcgagggcgttgtcgtgctgtcgccgacgcttccgatagatggctcgatacctgcttctgccaaccgctcggaatagcgaaaggacacgtattgaacaccgcgatccgagtgatgcactaggccgccatgagcgggacgccgatcatgatgagcctcctcgagggcatcgaggacaaagcctgcatgtgctgtccggctcgcccgccatccgacaatgcgacgggcgaagacgtcgatcacgaaggccacgtagacgaagccctcccaagtggcgacataagtacggacatgcgcaaaggctttcccggtttgtcgctgatggtgcaagagacgctgaagcgcgatccgatgcgcaggcatctgttcgtcttccgcggtcgtggcggtggcctgatcaaggtcactcgccgaagagctgcatgattggctcgaaaccgagcgggggaaattgtcgcgcagttctcccgtcgccgaggcgataaattacatgctcaagcgatgggatggcattacgtcattcctcgatgacggcccgatttgcctgacgaacaatgctgccgaacgaacgctcagaggctatgtactcggcaggaagtcatggctgtttgccggatcggatcgttgtgctgaacgtgcggcgttcatggcgacactgatcatgagcgccaagctcaataacatcgatccgcaggcctggcttgccgacgtccgcgccgaccttgcggacgctccgatcagcaggcttgagcaacagctgccgtggaactggacatccaagacactgagtgctcaggcggcctgacctgcggccttcaccggatacttaccccattatcgcagattgcgatgaagcatcagcgtcattcagcaatcttgccaaagtatgcaggctcgcgagaatcgacgtgcgaaaccggctggttgcgccaaagatccgcttgcggagcggtcgaacattcatgctgggacttcaagaggtcgagtagaggaagaaccggaaaggttgcaccggaaaatatgcgttcctttggagagcgcctcatggacgtgaacaaatcgcccggaccaaggatgccacggatacaaaagctcgcgaagctcggtcccgtgggtgttctgtcgtctcgttgtacaacgaaatccattcccattccgcgctcaagatggcttcccctcggcagttcatcagggctaaatcaatctagccgacttgtccggtgaaatgggctgcactccaacagaaacaatcaaacaaacatacacagcgacttattcacacgagctcaaattacaacggtatatatcctgccagtcagcatcatcacaccaaaagttaggcccgaatagtttgaaattagaaagctcgcaattgaggtctacaggccaaattcgctcttagccgtacaatattactcaccggtgcgatgccccccatcgtaggtgaaggtggaaattaatgatccatcttgagaccacaggcccacaacagctaccagtttcctcaagggtccaccaaaaacgtaagcgcttacgtacatggtcgataagaaaaggcaatttgtagatgttaacatccaacgtcgctttcagggatcgatccaatacgcaaaccgcctctccccgcgcgttggccgattcattaatgcagctggcacgacaggtttcccgactggaaagcgggcagtgagcgcaacgcaattaatgtgagttagctcactcattaggcaccccaggctttacactttatgcttccggctcgtatgttgtgtggaattgtgagcggataacaatttcacacaggaaacagctatgaccatgattacgccaagcttgcatgcctgcaggtcgactctagaggatctggcgcgccctatagatgggatgaagctgctctcgacaaatctgataaaactaaagaaggttagtaatcaatttttacaaaatcatagattatttttttcattgaattatttttatgctataccaagaattgtattttagtatttgttttaactacatataatagaattaactacatataaattaactaaacttaaaataaaaatagatttgtttcctgaaattattttaagaatatatatgtatatatctaaaatcttagacttagatagatttttctatctatctattttggttacttaaaataaataaatttgtataaataattgtatagttatcaaaaattaaaactaatttttttaaagttgttgatatataaaatactaaagatttaacgattaagtatttatttaagtatagaattttgttttttttttaagtttagttatgaagttgttaattatattaaaacaaaacaatatttcgaaattttattatcatattcgaatatattttttttagtgatgatgtatgaattattatcataatttgaaagtttactaaaaaatatatcaacatgaattgtaatatatgagttattaccttaaccaaaattataaattaacattaaatataattatatatgtcatatttagccatacaatgtgtcatcaatattaatagtcatgtcaatattacataatgccaatattatgctacttaaaccccaaatcccctaactcccgttaagtagccaaattcataaatatacttattcgacaaaataaaaaactttaaaatatttactaatccgaccatgcacaagcatccattccctattccattgccacgggataacaatgcaaccnactcctcaaaaaaagaaaaattcaagctcttttgcaaaaaaaaataaaataattttaacacctaaaattttttgtttccaaacttctacagggaacacacataaaagaaaaagaggacgtccactcggatcacgcaacaaaccaaaaggtgtgtcatgactcctaagatataatatttccttattcaaaatcataccattttaaattatgaatgtatttcgtagtccaccagatatgtaatccaccagcgttcaaaccaaagttttatgattgtaagtttaagtgaattataataatatattcttcacggtatcttttcataactaattgagttatcaaacttgatcgcacatgtggctttgataggtgtgacttttatggtatacaattctttcaacctaaaaacattattgttcctcaatatcttacattatgcttgactgcaacaaaatattttctcatctgttttcttcctttaaaccaatttattatcatctatttcctgacattttaatccatccacctatgtcaaaaacttatagaaaatgtcaacttccaaacaaaacataattgaacttcgcaaataaattcttaataatattaaaaaatgttacttaattatttcttcaaccccattttccgcgcgtagcgcggacaaagactctagttaaatatagaagtttccgattctcatcgtataaaacggtgactttggcgggctttcatgtgtaacaaattggtttaacaaaccactgcctagtcgtttagtgtagaatcagcgcatggaactccgattggagcgtgactttcacgtgccggaggcccaccaccacagcgggcgttacgctctaagaatctcgcccacggttttcttcatctgccccccgccaagtgtcttcctcgttcgccacttctcaccaagttacaggaaccctaaaaatggcctttcttcagccccggctataatacacacatgatcctatagtgggttcttccacaagttacatctccttctggattgtacatttcaagtgtttgtgttttttctgcctctgagagaaaatcgcggccgcatggagagatctcaacggcagtctcctccgccaccgtcgccgtcctcctcctcgtcctccgtctccgcggacaccgtcctcgtccctcccggaaagaggcggagggcggcgacggccaaggccggcgccgagcctaataagaggatccgcaaggaccccgccgccgccgccgcggggaagaggagctccgtctacaggggagtcaccaggcacaggtggacgggcaggttcgaggcgcatctctgggacaagcactgcctcgccgcgctccacaacaagaagaaaggcaggcaagtctacctgggggcgtatgacagcgaggaggcagctgctcgtgcctatgacctcgcagctctcaagtactggggtcctgagactctgctcaacttccctgtggaggattactccagcgagatgccggagatggaggccgtgtcccgggaggagtacctggcctccctccgccgcaggagcagcggcttctccaggggcgtctccaagtacagaggcgtcgccaggcatcaccacaacgggaggtgggaggcacggattgggcgagtctttgggaacaagtacctctacttgggaacatttgacactcaagaagaggcagccaaggcctatgaccttgcggccattgaataccgtggcgtcaatgctgtaaccaacttcgacatcagctgctacctggaccacccgctgttcctggcacagctccaacaggagccacaggtggtgccggcactcaaccaagaacctcaacctgatcagagcgaaaccggaactacagagcaagagccggagtcaagcgaagccaagacaccggatggcagtgcagaacccgatgagaacgcggtgcctgacgacaccgcggagcccctcaccacagtcgacgacagcatcgaagagggcttgtggagcccttgcatggattacgagctagacaccatgtcgagaccaaactttggcagctcaatcaatctgagcgagtggttcgctgacgcagacttcgactgcaacatcggatgcctgttcgatgggtgttctgcggctgacgaaggaagcaaggatggtgtaggtctggcagatttcagtctgtttgaggcaggtgatgtccagctgaaggatgttctttcggatatggaagaggggatacaacctccagcgatgatcagtgtgtgcaacgcggccgcaagtatgaactaaaatgcatgtaggtgtaagagctcatggagagcatggaatattgtatccgaccatgtaacagtataataactgagctccatctcacttcttctatgaataaacaaaggatgttatgatatattaacactctatctatgcaccttattgttctatgataaatttcctcttattattataaatcatctgaatcgtgacggcttatggaatgcttcaaatagtacaaaaacaaatgtgtactataagactttctaaacaattctaaccttagcattgtgaacgagacataagtgttaagaagacataacaattataatggaagaagtttgtctccatttatatattatatattacccacttatgtattatattaggatgttaaggagacataacaattataaagagagaagtttgtatccatttatatattatatactacccatttatatattatacttatccacttatttaatgtctttataaggtttgatccatgatatttctaatattttagttgatatgtatatgaaagggtactatttgaactctcttactctgtataaaggttggatcatccttaaagtgggtctatttaattttattgcttcttacagataaaaaaaaaattatgagttggtttgataaaatattgaaggatttaaaataataataaataacatataatatatgtatataaatttattataatataacatttatctataaaaaagtaaatattgtcataaatctatacaatcgtttagccttgctggacgaatctcaattatttaaacgagagtaaacatatttgactttttggttatttaacaaattattatttaacactatatgaaatttttttttttatcagcaaagaataaaattaaattaagaaggacaatggtgtcccaatccttatacaaccaacttccacaagaaagtcaagtcagagacaacaaaaaaacaagcaaaggaaattttttaatttgagttgtcttgtttgctgcataatttatgcagtaaaacactacacataacccttttagcagtagagcaatggttgaccgtgtgcttagcttcttttattttatttttttatcagcaaagaataaataaaataaaatgagacacttcagggatgtttcaacaagcttggatcctcgaagagaagggttaataacacacttttttaacatttttaacacaaattttagttatttaaaaatttattaaaaaatttaaaataagaagaggaactctttaaataaatctaacttacaaaatttatgatttttaataagttttcaccaataaaaaatgtcataaaaatatgttaaaaagtatattatcaatattctctttatgataaataaaaagaaaaaaaaaataaaagttaagtgaaaatgagattgaagtgactttaggtgtgtataaatatatcaaccccgccaacaatttatttaatccaaatatattgaagtatattattccatagcctttatttatttatatatttattatataaaagctttatttgttctaggttgttcatgaaatatttttttggttttatctccgttgtaagaaaatcatgtgctttgtgtcgccactcactattgcagctttttcatgcattggtcagattgacggttgattgtatttttgttttttatggttttgtgttatgacttaagtcttcatctctttatctcttcatcaggtttgatggttacctaatatggtccatgggtacatgcatggttaaattaggtggccaactttgttgtgaacgatagaattttttttatattaagtaaactatttttatattatgaaataataataaaaaaaatattttatcattattaacaaaatcatattagttaatttgttaactctataataaaagaaatactgtaacattcacattacatggtaacatctttccaccctttcatttgttttttgtttgatgactttttttcttgtttaaatttatttcccttcttttaaatttggaatacattatcatcatatataaactaaaatactaaaaacaggattacacaaatgataaataataacacaaatatttataaatctagctgcaatatatttaaactagctatatcgatattgtaaaataaaactagctgcattgatactgataaaaaaatatcatgtgctttctggactgatgatgcagtatacttttgacattgcctttattttatttttcagaaaagctttcttagttctgggttcttcattatttgtttcccatctccattgtgaattgaatcatttgcttcgtgtcacaaatacaatttagntaggtacatgcattggtcagattcacggtttattatgtcatgacttaagttcatggtagtacattacctgccacgcatgcattatattggttagatttgataggcaaatttggttgtcaacaatataaatataaataatgtttttatattacgaaataacagtgatcaaaacaaacagttttatctttattaacaagattttgtttttgtttgatgacgttttttaatgtttacgctttcccccttcttttgaatttagaacactttatcatcataaaatcaaatactaaaaaaattacatatttcataaataataacacaaatatttttaaaaaatctgaaataataatgaacaatattacatattatcacgaaaattcattaataaaaatattatataaataaaatgtaatagtagttatatgtaggaaaaaagtactgcacgcataatatatacaaaaagattaaaatgaactattataaataataacactaaattaatggtgaatcatatcaaaataatgaaaaagtaaataaaatttgtaattaacttctatatgtattacacacacaaataataaataatagtaaaaaaaattatgataaatatttaccatctcataagatatttaaaataatgataaaaatatagattattttttatgcaactagctagccaaaaagagaacacgggtatatataaaaagagtacctttaaattctactgtacttcctttattcctgacgtttttatatcaagtggacatacgtgaagattttaattatcagtctaaatatttcattagcacttaatacttttctgttttattcctatcctataagtagtcccgattctcccaacattgcttattcacacaactaactaagaaagtcttccatagccccccaagcggcccatggcctcctccgaggacgtcatcaaggagttcatgcgcttcaaggtgcgcatggagggctccgtgaacggccacgagttcgagatcgagggcgagggcgagggccgcccctacgagggcacccagaccgccaagctgaaggtgaccaagggcggccccctgcccttcgcctgggacatcctgtccccccagttccagtacggctccaaggtgtacgtgaagcaccccgccgacatccccgactacaagaagctgtccttccccgagggcttcaagtgggagcgcgtgatgaacttcgaggacggcggcgtggtgaccgtgacccaggactcctccctgcaggacggctccttcatctacaaggtgaagttcatcggcgtgaacttcccctccgacggccccgtaatgcagaagaagactatgggctgggaggcctccaccgagcgcctgtacccccgcgacggcgtgctgaagggcgagatccacaaggccctgaagctgaaggacggcggccactacctggtggagttcaagtccatctacatggccaagaagcccgtgcagctgcccggctactactacgtggactccaagctggacatcacctcccacaacgaggactacaccatcgtggagcagtacgagcgcgccgagggccgccaccacctgttcctgtagcggccggccgcgacacaagtgtgagagtactaaataaatgctttggttgtacgaaatcattacactaaataaaataatcaaagcttatatatgccttccgctaaggccgaatgcaaagaaattggttctttctcgttatcttttgccacttttactagtacgtattaattactacttaatcatctttgtttacggctcattatatccgtcgacgg

SEQ ID NO: 72 - DNA, 586 bp, Brassica napus
ccaatttattatcatctatttcctgacattttaatccatccacctatgtcaaaaacttatagaaaatgtcaacttccaaacaaaacataattgaacttcgcaaataaattcttaataatattaaaaaatgttacttaattatttcttcaaccccattttccgcgcgtagcgcggacaaagactctagttaaatatagaagtttccgattctcatcgtataaaacggtgactttggcgggctttcatgtgtaacaaattggtttaacaaaccactgcctagtcgtttagtgtagaatcagcgcatggaactccgattggagcgtgactttcacgtrccggaggcccaccaccwcagcgggcgttacgctctaagaatctcgcccacggttttcttcatctcccccccgccaagtgtctccctcgttcgccacttctcatcatgttacagggaccataaaaatggcgtatttcttcagccccgggtataaatacacacatgatcctgtggtgggttcttccacaagttacatctccttctggtttttgtattgcaagtgtttgtattttttgcctccgagagaaaatc

SEQ ID NO: 73 - DNA, 1924 bp, Brassica napus
  misc_feature (859)..(859): n is a, c, g, or t
ctatagatgggatgaagctgctctcgacaaatctgataaaactaaagaaggttagtaatcaatttttacaaaatcatagattatttttttcattgaattatttttatgctataccaagaattgtattttagtatttgttttaactacatataatagaattaactacatataaattaactaaacttaaaataaaaatagatttgtttcctgaaattattttaagaatatatatgtatatatctaaaatcttagacttagatagatttttctatctatctattttggttacttaaaataaataaatttgtataaataattgtatagttatcaaaaattaaaactaatttttttaaagttgttgatatataaaatactaaagatttaacgattaagtatttatttaagtatagaattttgttttttttttaagtttagttatgaagttgttaattatattaaaacaaaacaatatttcgaaattttattatcatattcgaatatattttttttagtgatgatgtatgaattattatcataatttgaaagtttactaaaaaatatatcaacatgaattgtaatatatgagttattaccttaaccaaaattataaattaacattaaatataattatatatgtcatatttagccatacaatgtgtcatcaatattaatagtcatgtcaatattacataatgccaatattatgctacttaaaccccaaatcccctaactcccgttaagtagccaaattcataaatatacttattcgacaaaataaaaaactttaaaatatttactaatccgaccatgcacaagcatccattccctattccattgccacgggataacaatgcaaccnactcctcaaaaaaagaaaaattcaagctcttttgcaaaaaaaaataaaataattttaacacctaaaattttttgtttccaaacttctacagggaacacacataaaagaaaaagaggacgtccactcggatcacgcaacaaaccaaaaggtgtgtcatgactcctaagatataatatttccttattcaaaatcataccattttaaattatgaatgtatttcgtagtccaccagatatgtaatccaccagcgttcaaaccaaagttttatgattgtaagtttaagtgaattataataatatattcttcacggtatcttttcataactaattgagttatcaaacttgatcgcacatgtggctttgataggtgtgacttttatggtatacaattctttcaacctaaaaacattattgttcctcaatatcttacattatgcttgactgcaacaaaatattttctcatctgttttcttcctttaaaccaatttattatcatctatttcctgacattttaatccatccacctatgtcaaaaacttatagaaaatgtcaacttccaaacaaaacataattgaacttcgcaaataaattcttaataatattaaaaaatgttacttaattatttcttcaaccccattttccgcgcgtagcgcggacaaagactctagttaaatatagaagtttccgattctcatcgtataaaacggtgactttggcgggctttcatgtgtaacaaattggtttaacaaaccactgcctagtcgtttagtgtagaatcagcgcatggaactccgattggagcgtgactttcacgtgccggaggcccaccaccacagcgggcgttacgctctaagaatctcgcccacggttttcttcatctgccccccgccaagtgtcttcctcgttcgccacttctcaccaagttacaggaaccctaaaaatggcctttcttcagccccggctataatacacacatgatcctatagtgggttcttccacaagttacatctccttctggattgtacatttcaagtgtttgtgttttttctgcctctgagagaaaatc
